(19) United States
(12) Patent Application Publication
(10) Pub. No.: US 2026/0158147 A1
(43) Pub. Date: Jun. 11, 2026

(54) METHODS AND COMPOSITIONS FOR TARGETED DELIVERY OF THERAPEUTICS

(71) Applicant: Manifold Biotechnologies, Inc., Boston, MA (US)

(72) Inventors: Pierce Ogden, Jamaica Plain, MA (US); Kathleen Nudel, Boston, MA (US); Erik Swanson, Boston, MA (US); Salvatore Alioto, Waltham, MA (US); Alvaro Garcia, Arlington, MA (US); Karen Duffy, Somerville, MA (US); Alexander Reis, Jamaica Plain, MA (US); Glenn Gordon Hauk, Cambridge, MA (US); Naveen Khinduka Mehta, Watertown, MA (US); Marshall A. Case, Waltham, MA (US)

(21) Appl. No.: 19/205,127

(22) Filed: May 12, 2025

Related U.S. Application Data
(60) Provisional application No. 63/646,969, filed on May 13, 2024.
(60) Provisional application No. 63/676,361, filed on Jul. 27, 2024.
(60) Provisional application No. 63/703,625, filed on Oct. 4, 2024.
(60) Provisional application No. 63/710,935, filed on Oct. 23, 2024.
(60) Provisional application No. 63/758,738, filed on Feb. 14, 2025.
(60) Provisional application No. 63/780,105, filed on Mar. 28, 2025.

(51) Int. Cl. A61K 47/42; A61K 31/7105; A61K 31/711; A61K 38/00; C07K 14/00; C07K 16/00; C12N 15/11; C40B 30/04; C40B 40/10; C40B 70/00; G01N 33/68

(52) U.S. Cl. CPC A61K 47/42; A61K 31/7105; A61K 31/711; A61K 38/00; C07K 14/00; C07K 16/00; C12N 15/11; C40B 30/04; C40B 40/10; C40B 70/00; G01N 33/6803; C07K 2317/565

(57) ABSTRACT

Compositions, methods and systems for targeted delivery using one or more shuttles operably linked to one or more cargos (e.g., cargo polypeptides, e.g., cargo oligonucleotides) and subsequent quantification of an abundance of one or more cargos (e.g., proteins) in a mixture (e.g., a complex mixture (e.g., in vivo)) or in a specific cell, tissue, or organ of interest (e.g., in vivo) using barcodes (e.g., peptide barcodes), binders (e.g., polypeptide binders), and binding agents (e.g., phage) are provided herein.

### CROSS-REFERENCE TO RELATED APPLICATIONS

[0001] This application claims priority to and the benefit of U.S. Provisional Application No. 63/646,969, filed May 13, 2024, U.S. Provisional Application No. 63/676,361, filed Jul. 27, 2024, U.S. Provisional Application No. 63/703,625, filed Oct. 4, 2024, U.S. Provisional Application No. 63/710,935, filed Oct. 23, 2024, U.S. Provisional Application No. 63/758,738, filed Feb. 14, 2025, U.S. Provisional Application No. 63/780,105, filed Mar. 28, 2025, the disclosures of which are incorporated by reference herein in their entireties.

### SEQUENCE LISTING

[0002] The present specification makes reference to a Sequence Listing (submitted electronically as an .xml file named 2013703-0034_SL.xml on Feb. 20, 2026). The .xml file was generated on Jul. 8, 2025, and is 9,471,940 bytes in size. The entire contents of the Sequence Listing are herein incorporated by reference.

### BACKGROUND

[0003] Assessments of agents (e.g., cargo components encoding cargo polypeptides, delivery particles, shuttles, etc.) are central to much of molecular and pharmaceutical biology.

### SUMMARY

[0004] The present disclosure provides insights and technologies that achieve improved or otherwise desirable assessment of agents (e.g., shuttle agents, nucleic acids comprising and/or encoding shuttle agents, cargo agents (e.g., one or more nucleic acid sequence components, e.g., cargo polypeptide agents, e.g., cargo oligonucleotide agents), therapeutic agents, and/or in some embodiments delivery particles comprising such nucleic acids comprising and/or encoding shuttle agents, cargo agents, and/or therapeutic agents). Among other things, the present disclosure provides insights and technologies that achieve improved or otherwise desirable agents, which for example target specific tissues and/or organs of interest (e.g., brain). For example, the present disclosure provides insights and technologies that achieve improved delivery (e.g., using one or more shuttles as described herein) to one or more tissues and/or organs of interest (e.g., brain). For example, the present disclosure appreciates that one or more agents (e.g., shuttle agents, therapeutic agents, cargo agents) can be engineered for desirable properties (e.g., tropism, clearance, efficacy, reduced toxicity (e.g., reduced anemia), etc.) in target tissues and/or organs (e.g., brain). In some embodiments, desirable properties include increased target delivery to/across the blood brain barrier (“BBB”). The present disclosure appreciates that such engineering may be achieved using AI-based design. Other platforms that are limited to AI-based design and/or other in silico approaches often generate agents that perform with desirable properties in vitro but fail in vivo. However, the present disclosure provides insights and technologies that achieve such engineering using AI-based design and assess such designs (e.g., of shuttle agents and/or cargo agents and/or therapeutics agents) using a binder-barcode platform described herein, so as to generate agents with desirable properties both in vitro and more importantly in vivo. For example, among other things, a shuttle agent described herein comprises a structural feature (e.g., length, hydrophobicity, affinity, etc.) that has an effect (e.g., positive or negative) on cargo function.

[0005] Among other things, the present disclosure appreciates that many current technologies for targeted delivery (e.g., targeted delivery of cargo agents and/or therapeutic agents) to specific tissues and/or organs of interest, may typically be non-specific (e.g., may not be delivered to a specific tissue and/or organ of interest) and/or may be inefficient (e.g., may have reduced bioavailability to a specific tissue and/or organ of interest). Additionally, the present disclosure appreciates that many current technologies for assessing targeted delivery (e.g., targeted delivery of cargo agents and/or therapeutic agents) are slow and/or costly to perform or implement; many such assessments must be performed one at a time and are laborious.

[0006] Among other things, the present disclosure appreciates that many current technologies for assessing, and in particular for determining presence and/or abundance of, one or more agents of interest, may typically rely on mass spectroscopy and/or affinity (e.g., immuno-) detection. The present disclosure appreciates that many available affinity detection technologies are slow and/or costly to perform or implement; many such technologies must be performed one at a time and many are constrained, for example, by availability of fluorogenic substrates (e.g., that may be assessed by relevant technologies—e.g., light microscopy).

[0007] The present disclosure further appreciates that certain other technologies, such as DNA barcoding technologies, that are sometimes utilized to assess agents of interest, can also suffer disadvantages. DNA barcodes, for example, can lack stability and/or display undesirable immunogenicities, e.g., when utilized in vivo. The present disclosure appreciates that such technologies therefore can encounter problems, particularly for assessing agents (e.g., cargo agents) in complex environments (e.g., in vivo).

[0008] Among other things, the present disclosure encompasses the recognition of the source of certain problems with available technologies typically utilized to assess agents of interest, and in particular to assess cargo agents, shuttle agents, and/or delivery particles of interest. In particular, the present disclosure identifies the source of certain problems encountered by such technologies for assessment (e.g., detection and/or measurement of quantity, such as concentration; e.g., inabilities to detect and/or quantify functional information) of multiple agents, and in particular when such agents are present in a complex system (e.g., in a complex solution and/or in vivo).

[0009] Furthermore, the present disclosure provides certain technologies that achieve such assessments, in some embodiments with surprisingly high accuracy. Those skilled in the art will appreciate that a number of contexts exist in which detection and/or measurement (e.g., of a precise amount), of a plurality of agents within a complex system is desirable; moreover, those skilled in the art will appreciate the benefit of high accuracy in many such contexts.

[0010] Among other things, the present disclosure provides technologies that achieve detection and/or measurement (e.g., highly accurate and/or otherwise precise measurement) of one or more, and in some embodiments of a plurality of agents (e.g., nucleic acids comprising and/or encoding cargo agents, e.g., delivery particles comprising nucleic acids comprising and/or encoding cargo agents), including in complex systems (e.g., in vivo). In some embodiments, detected agent(s) may be or comprise cargo agents and/or forms thereof (e.g., aggregated; complexed; covalently modified such as by disulfide bond formation, glycosylation, pegylation, phosphorylation; truncated such as by proteolytic cleavage, etc.).

[0011] In some embodiments, detected agent(s) may be delivered via delivery particles (e.g., viral particles, virus-like particles, lipid-based particles, polymer-based particles, bead-based, metal-based, or polysaccharide-based particles of interest; e.g., of same and/or different types) in varying conditions (e.g., physiological conditions, e.g., target tissues of interest). In some embodiments, nucleic acids are disposed within delivery particles. In some embodiments, a nucleic acid sequence comprising (a) a cargo component that encodes a cargo polypeptide; (b) a barcode component wherein the cargo component is operably linked to the barcode component. In some embodiments, cargo components include other types of cargo as described herein. In some embodiments, detection of a cargo component associated with a barcode component can be used in turn to assess and/or quantify phenotypes of a delivery particle of interest (e.g., tropism, etc.).

[0012] In some embodiments, provided technologies are particularly useful or effective for assessment of therapeutic agents. For example, in some embodiments, provided technologies may be particularly useful for the assessment of one or more features (e.g., properties (e.g., concentration, localization, persistence, affinity, etc.)) of agent(s) of interest; in some such embodiments, relevant agent(s) may be characterized by one or more attributes appropriate or desirable for therapeutic use. For example, in some embodiments, provided technologies may be used to screen potential therapeutic agents (e.g., polypeptide entities) for one or more features (e.g., properties, attributes) suitable for therapeutic use. In some embodiments, features of potential therapeutic agent(s) may be measured one at a time. In some embodiments, two or more features of potential therapeutic agent(s) may be measured simultaneously. For example, in some embodiments, one or more therapeutic agents may be screened for an affinity to a target agent—yet other desirable properties for example molecular stability in a physiologically relevant environment are not yet known. In some embodiments, for example, one or more therapeutic agents may be screened for an affinity to a target agent, along with other desirable properties, for example molecular stability in a physiologically relevant environment.

[0013] The present disclosure appreciates that many current methods of polypeptide measurement rely on determining the abundance of light of a certain wavelength, or overall luminescence, such as western blot or ELISA (Towbin 1979, Engvall 1972). Due to constraints of visible light wavelength, these methods allow for only a small number of different polypeptides, often fewer than 4, to be measured at a single time within a single reaction (Elshal, 2006). The present disclosure appreciates that many applications, including drug discovery applications, would benefit from (and, in some cases, require) dramatically higher throughput.

[0014] The present disclosure further appreciates that nucleic acid sequencing technologies (e.g., DNA sequencing technologies) have been developed that can analyze billions of individual DNA molecules in a single experiment (Shendure, 2005). Various strategies have been developed to try to apply this massive throughput achievable with nucleic acid sequencing techniques to protein detection and measurement, in particular by tagging proteins with an attached piece of DNA (typically referred to as a “DNA barcode”), which may then be sequenced to indirectly detect the protein (Trads, 2017) or one or more features of the protein.

[0015] The present disclosure appreciates the power of applying high-throughput nucleic acid sequencing technologies to assessment of other agents, and in particular of cargo agents, but also identifies the source of certain problems associated with many approaches utilized to study polypeptides by attachment of DNA barcodes. For example, the present disclosure appreciates that modification of a protein by attachment of a DNA barcode can often alter its functionality (Trads, 2017), which can defeat the purpose of using the DNA barcode to assess a polypeptide.

[0016] Known techniques to quantify or screen a plurality of therapeutic moieties are described by WO2020097254 (Gordian Biotechnology). The present disclosure identifies the source of a problem with such approaches, however, and moreover provides certain advantages relative to them, including the ability to assess and/or quantify cargo polypeptides directly. Approaches such as those described by Gordian Biotechnology fail to describe such a feature and rely on cell-based analyses. Furthermore, as may be appreciated by a person of ordinary skill in the art, reading the present disclosure, cell-based analyses are limited by experimental complexity, number of outputs, require additional enrichment steps, and cost. In comparison, the present disclosure is not limited by such disadvantages since nucleic acid sequences that encode one or more polypeptide binders that are associated with one or more peptide barcodes can be sequenced and measured to quantify the cargo component without the need of additional analyses and/or enrichment steps.

[0017] Known techniques to quantify barcoded cargo polypeptides include those as presented in Egloff et al. (2019), that use mass spectrometry to determine the presence or absence of a protein sequence in a mixture (Egloff 2019). The present disclosure identifies the source of a problem with such approaches, however, and moreover provides certain advantages relative to them, including, for example, by using nucleic acids (e.g., DNA) for amplification of the original signal; approaches such as those described in Egloff et al. fail to include (or to benefit from) such a feature. Furthermore, as may be appreciated by a person of ordinary skill in the art, reading the present disclosure, mass spectrometry only reads out the mass-to-charge ratio of an associated sequence; thus methods using mass spectrometry are limited in their total throughput, since different sequences can have the same mass-to-charge ratio. By comparison, the present invention is not limited by such disadvantages since the nucleic acid sequence associated with one or more binding agents in turn associated with each barcode is sequenced and measured to determine and quantify the barcoded cargo polypeptide.

[0018] Other techniques available in the art use antibodies displayed on phage (Fab-phage) to determine presence of endogenous proteins expressed on cell surfaces (Pollock, 2018). In such methods, one Fab-phage is generated per endogenous protein (i.e., target protein to be assessed) and no barcodes are utilized. In contrast, the present technology envisions the use of engineered barcode sequences that are generalizable, such that they can be used to mark any protein, whether endogenous or exogenous to the context in which it is applied, and subsequently measured using one or more binding agents to which each barcode, and therefore each barcoded cargo polypeptide, is uniquely associated with (i.e., a “barcode fingerprint” as described elsewhere in this disclosure). Such complex association of one or more binding agents with a barcode is then measured and precise quantification of the associated protein is achieved, e.g., using a complex algorithm (i.e., ‘decoding’ as described elsewhere in this disclosure).

[0019] The present disclosure recognizes the ability of antigens displayed on phages to determine epitopes of antibodies within the blood to which the phages are able to bind (Mohan, 2018). However, this method is not able to determine the sequence of the antibody to which the antigen binds, and thus only provides limited information on any antibodies that specifically bind to the antigens displayed on phage. However, the present disclosure provides systems, compositions, and methods that provide the advantage of using generic barcodes with known affinities to one or more binders or binding agents, that can be used to tag any target(s) of interest in a complex mixture, including but not limited to blood, to determine and quantify the target(s).

[0020] The present disclosure, among other things, provides technologies that can achieve assessment (e.g., detection and/or quantification) of multiple agents (e.g., multiple nucleic acids comprising and/or encoding cargo agents, multiple delivery particles comprising nucleic acids encoding cargo agents, and/or a combination thereof) within a pool of such agents, using DNA sequencing without requiring (direct or indirect) covalent association of the DNA with the assessed agent, or otherwise constraining the assessed agent.

[0021] Described herein are peptide barcodes (also known as “barcodes”) and technologies to make and/or utilize them. In some embodiments, barcodes are utilized to mark cargos. Among other things, such an approach can achieve pooled measurement of cargos without amending non-polypeptide identifiers. In some embodiments, a peptide barcode is an amino acid polypeptide sequence. In some embodiments, a peptide barcode is contained within a cargo (e.g., a polypeptide (e.g., an antibody, e.g., a cell-surface antigen) to be measured; e.g., is endogenous to a cargo to be measured). In some embodiments, a peptide barcode is not contained with a cargo polypeptide (e.g., an antibody, e.g., a cell-surface antigen) to be measured; e.g., is exogenous to a cargo polypeptide to be measured). In some embodiments, a barcode, for example, is a sequence (e.g., a designed sequence) contained within a cargo (e.g., a cargo to be measured). In some embodiments, a cargo comprises a cargo polypeptide. In some embodiments, a barcode is associated (e.g., bound (e.g., covalently)) to the N terminus of a cargo polypeptide (e.g., a cargo polypeptide to be measured). In some embodiments, a barcode is associated (e.g., bound (e.g., covalently)) to the C terminus of a cargo polypeptide (e.g., a cargo polypeptide to be measured). In some embodiments, a barcode is associated (e.g., bound (e.g., covalently)) proximal to the N terminus (e.g., internal to a cargo polypeptide (e.g., a loop region that is proximal to the N terminus)) of a cargo polypeptide (e.g., a cargo polypeptide to be measured). In some embodiments, a barcode is associated (e.g., bound (e.g., covalently)) proximal to the C terminus e.g., internal to a cargo polypeptide (e.g., a loop region that is proximal to the C terminus)) of a cargo polypeptide (e.g., a cargo polypeptide to be measured).

[0022] Methods disclosed herein may use peptide barcodes that are designed to have varying lengths. In some embodiments, a peptide barcode may have a length ranging between 1-100, 5-50, 8-25, 9-25, or 9-15 amino acids. In some embodiments, a peptide barcode may have a length of at least 25 amino acids. In some embodiments, a peptide barcode may have a length of at most 8 amino acids. In some embodiments, a peptide barcode may have a length of 10 amino acids.

[0023] Barcode sequences as described herein may be reused, so as to be able to quantify different agents (e.g., nucleic acids comprising and/or encoding cargos of interest, e.g., delivery particles of interest, each comprising a nucleic acid encoding a cargo of interest) or mixture of agents (mixture of cargos of interest to be measured and/or mixture of delivery particles to be measured, e.g., via detection of a barcoded cargo). In some embodiments, a barcode is generated such that it can be easily reused between several different agents (e.g., nucleic acids comprising and/or encoding cargos of interest, e.g., delivery particles of interest, each comprising a nucleic acid encoding a cargo of interest) across different experiments.

[0024] Among other things, barcodes described herein are designed to be distinct from each other (e.g., unique). In some embodiments, a barcode is designed to have a distinct sequence (e.g., distinct from another barcode). For example, each barcode is designed to be distinct (e.g., unique) from every other barcode used in an experiment, such that each agent (e.g., nucleic acids comprising cargos to be measured, e.g., delivery particles comprising a nucleic acid comprising a cargo to be measured) is associated (e.g., operably linked) with at least one barcode, and each barcode (e.g., barcode with a specific sequence) is only associated with one cargo. As may be understood by a person of ordinary skill in the art, the diversity of barcodes contained within a pool is limited only by the possible diversity of amino acid sequences for a given barcode length. For example, for a barcode length ‘N’, there exists 20^{N} distinct amino acid barcode sequences of length N.

[0025] Methods described herein relate to the detection of one or more barcodes using a binding agent. In some embodiments, a barcode is contacted with a binding agent that is associated with or comprises a detectable nucleic acid. For example, in some embodiments, a binding agent may be or comprises a phage, a ribosome, mRNA, DNA, etc. In some embodiments, a binding agent is a phage with a binding motif on its surface (e.g., a polypeptide binder as described herein). In some embodiments, a binding agent comprises a detectable nucleic acid. In some embodiments, a binding agent expresses a detectable nucleic acid. In some embodiments, a binding agent expresses a detectable nucleic acid on (e.g., on a surface of) the binding agent (e.g., a binder). In some embodiments, a binder is a polypeptide. In some embodiments, a binder associates with a barcode (e.g., with known specificity and affinity). In some embodiments a binder associates with one or more barcodes (e.g., with different known specificities and affinities). In some embodiments, a binder is an antibody (e.g., expressed on a surface of a binding agent). In some embodiments, for example, to detect the presence of a specific (e.g., distinct) barcode, the present disclosure envisions the association of a distinct detectable nucleic acid (e.g., a DNA sequence, an RNA sequence, etc.) to a specific barcode. This is achieved through the contact of a binder, which may be expressed on (e.g., on a surface of) a binding agent that comprises the distinct detectable nucleic acid.

[0026] Described herein are binders. In some embodiments, a binder is a polypeptide. In some embodiments, for example, a binder is generated to have known specificity and affinity for a given barcode. In some embodiments, a binder is generated to have known specificity and affinity for one barcode. In some embodiments, a binder is generated to have known specificity and affinity for multiple (e.g., two or more, three or more, etc.) barcodes. In some embodiments, a binder is generated to have known specificity and affinity for at least one barcode. In some embodiments, a binder, for example, is expressed on the surface of a binding agent (e.g., a phage, a ribosome, etc.) using methods known to those skilled in the art.

[0027] Among other things, systems and methods described, for example, as described herein, identify the advantages of nucleic acid sequencing techniques and apply them effectively to protein detection and measurement methods. For example, methods described herein may use several binders, with known specificities and affinities to different barcodes, which can be expressed on binding agents and mixed together in a single pool. Upon mixing with a pool of barcoded cargo (i.e., cargo polypeptides, each associated with a barcode as described herein), a binder expressed on a binding agent binds to any given barcode in the pool with known but varying affinities. Such a spectrum of affinities of a binder to various barcodes is termed herein as a ‘Binder Fingerprint’. Conversely, a barcode may bind to any given binder in a pool of binders with known but varying affinities. Such a spectrum of affinities of a barcode to various binders is termed herein as a ‘Barcode Fingerprint’. Thus, the presence of specific barcoded cargos can be detected, for example, in a complex solution, by extracting and sequencing the associated nucleic acid (e.g., detectable nucleic acid (e.g., DNA sequence, RNA sequence, etc.)) of the population of binding agents (e.g., phage) bound to barcodes associated with cargos.

[0028] Other methods to use binders to identify polypeptide sequences have been developed. However, these methods encounter a number of challenges, including difficulty in generating and characterizing binders, and effectively decoding their binding to specifically identify polypeptides. Another limitation with previously developed binders is their non-specific binding that results in poor signal-to-noise ratios, thereby negatively affecting the accuracy of detection. In contrast, the present technology generates many binders rapidly (e.g., in about a week, about 2 weeks, about 3 weeks, about 4 weeks, about 1 month, about 2 months, about 3 months, about 4 months, about 5 months, about 6 months, or about 1 year). In some embodiments, for example, between about 100 to about 1000 binders may be generated rapidly. In some embodiments, between about 10 to about 1000 binders may be generated rapidly. In some embodiments, between about 10 to about 10,000 binders may be generated rapidly. In some embodiments, at least about 10,000 binders may be generated rapidly.

[0029] Binders as described herein are robust. Binders can bind to barcodes (e.g., with robust affinities to one or more barcodes) as described herein in a variety of conditions and/or environments. For example, binders as described herein can bind to barcodes (e.g., with robust affinities to one or more barcodes) in various complex environments (e.g., in blood, tissue, serum, plasma, etc.). Thus, binders of the present disclosure may be used to detect targets (e.g., a nucleic acid encoding a cargo of interest) in varying conditions (e.g., physiological conditions, e.g., target tissues of interest). Moreover, binders of the present disclosure may also be used to detect delivery particles (e.g., viral particles, virus-like particles, lipid-based particles, polymer-based particles, bead-based, or polysaccharide-based particles of interest) in varying conditions (e.g., physiological conditions, e.g., target tissues of interest).

[0030] Analogously, barcodes, as described herein, may be generated in a rapid and robust manner. In some embodiments, barcodes as described herein are specific to binders as described herein. In some embodiments, for example, between about 100 to about 2000 barcodes may be generated rapidly (e.g., in about a week, about 2 weeks, about 3 weeks, about 4 weeks, about 1 month, about 2 months, about 3 months, about 4 months, about 5 months, about 6 months, or about 1 year). In some embodiments, between about 10 to about 1000 barcodes may be generated rapidly. In some embodiments, between about 10 to about 10,000 barcodes may be generated rapidly. In some embodiments, at least about 10,000 barcodes may be generated rapidly.

[0031] Barcodes as described herein are robust. Barcodes can bind to binders (e.g., with robust affinities to one or more binders) as described herein in a variety of conditions and/or environments. For example, barcodes as described herein can bind to binders (e.g., with robust affinities to one or more binders) in various complex environments (e.g., in blood, tissue, serum, plasma, etc.). Thus, barcodes of the present disclosure may be used to detect targets (e.g., agents of interest) in varying conditions (e.g., physiological conditions). The present disclosure, therefore corrects for the disadvantages and defects of existing methods (e.g., non-specific binding, variable binding in different environments, etc.) by generating large numbers of robust binders and barcodes rapidly, which may be used in combination with computational methods (e.g., deconvolution methods) described herein, to allow for specific, well-characterized binder-barcode binding/association and accurate detection methods.

[0032] The present disclosure also envisions an ability to modify sequence(s) of one or more peptide barcode sequences such that they are readily distinguishable from each other, and/or from potential background protein sequence. Analogously, the present disclosure also envisions the ability to modify the sequence(s) of one or more polypeptide binder sequences such that they are readily distinguishable from each other, and/or from potential background protein sequence.

[0033] Among other things, the present invention as described herein provides methods of testing ‘n’ distinct protein candidates where n≥1, in a single assay or animal model. In some embodiments, a protein candidate is a therapeutic protein candidate. In some embodiments, multiple protein candidates are designed and each distinct protein candidate is associated with its own unique peptide barcode as described herein. Such barcoding has many advantages, including but not limited to injecting all protein candidates in a single injection into an assay and/or an animal in a cost- and time-efficient manner. Subsequently, a sample (e.g., tissue sample, serum sample, blood sample, extracellular sample, single cell sample etc.) from an injected animal may be obtained and barcodes extracted. In some embodiments, such extracted barcodes provide a measure of the relative abundance of protein candidates originally injected. For example, one or more extracted barcodes may be identified by contacting them with a pool of binders (e.g., expressed on a binding agent) known to bind to the barcodes originally bound to the protein candidates. Following binding of barcodes and binders, bound binding agents (e.g., phage) are selected and their detectable nucleic acid (e.g., DNA sequence, RNA sequence, etc.) extracted. In some embodiments, extracted nucleic acids are subjected to sequencing (e.g., next generation sequencing). The sequenced nucleic acid may then be used to identify the one or more barcodes they were designed to bind to, which along with the previously established information on binding affinities between various binder-barcode pairs may be used to identify and determine the relative abundance of each protein originally injected.

[0034] Also described herein, are methods used to translate nucleic acid counts, for example from a sequencing experiment, to relative or absolute protein quantifications. In some embodiments, nucleic acid sequences are counted and in silico translated into protein sequences. As is described herein, a nucleic acid sequence corresponds to a binder sequence, with established and characterized affinity for every barcode given in a pool. In some embodiments, binder counts are compared to a database of known propensities for binding to a single barcode. In some embodiments, binder counts are compared to a database of known propensities for binding to multiple barcodes (e.g., two or more, three or more, etc.). In some embodiments, for example in a sequencing experiment, relative proportions of binder counts are compared directly in order to determine relative proportions of barcodes and/or proteins associated with barcodes. In some embodiments, as may be known to a person of ordinary skill in the art, sequences (e.g., control sequences or accessory sequences) of known abundance (e.g., count, quantification, concentration, etc.) are utilized (e.g., added to the sequencing experiment) to determine an absolute abundance (e.g., count, quantification, concentration, etc.) for a given binder or binders, which may be used to estimate an absolute abundance (e.g., count, quantification, concentration, etc.) for a barcode or barcodes, and/or protein(s) associated with barcode(s) using either direct counts or a linear model as described herein.

[0035] In some embodiments, a nucleic acid comprises a cargo component which encodes a cargo polypeptide. In some embodiments, a cargo polypeptide is or comprises a therapeutic polypeptide. In some embodiments, a cargo component further comprises one or more sequence elements. In some embodiments, a cargo component is associated with (e.g., operably linked to) nucleotide sequences encoding barcodes as described herein.

[0036] Among other things, the present disclosure provides a peptide shuttle that has or comprises an amino acid sequence having at least 80%, 85%, 90%, 91%, 92%, 93%, 94%, 95%, 96%, 97%, 98%, 99%, or 100% identity to any one of SEQ ID NOs: 8813-8894.

[0037] Moreover, among other things, the present disclosure provides a shuttle component that has or comprises a nucleic acid sequence having at least 80%, 85%, 90%, 91%, 92%, 93%, 94%, 95%, 96%, 97%, 98%, 99%, or 100% identity to any one of SEQ ID NOs: 8753-8812.

[0038] Moreover, among other things, the present disclosure provides a polypeptide comprising: (a) a peptide shuttle; and (b) a cargo polypeptide. In some embodiments, a peptide shuttle has or comprises an amino acid sequence according to any one of SEQ ID NOs: 8813-8894. In some embodiments, a peptide shuttle is encoded by a nucleic acid sequence having at least 80%, 85%, 90%, 91%, 92%, 93%, 94%, 95%, 96%, 97%, 98%, 99%, or 100% identity to any one of SEQ ID NOs: 8753-8812. In some embodiments, a peptide shuttle is encoded by a nucleic acid sequence according to any one of SEQ ID NOs: 8753-8812.

[0039] In some embodiments, a shuttle is a shuttle component (e.g., nucleic acid shuttle).

[0040] In some embodiments, a peptide shuttle has a length of 20 to 200 amino acids. In some embodiments, a peptide shuttle has a length of 50 to 200 amino acids. In some embodiments, a peptide shuttle has a length of 100 to 130 amino acids. In some embodiments, a peptide shuttle is encoded by a nucleic acid sequence having a length of 60-600 nucleic acids. In some embodiments, a peptide shuttle is encoded by a nucleic acid sequence having a length of 150-600 nucleic acids. In some embodiments, a peptide shuttle is encoded by a nucleic acid sequence having a length of 300-390 nucleic acids.

[0041] In some embodiments, a peptide shuttle is operably linked to a cargo polypeptide. In some embodiments, a peptide shuttle is encoded by a shuttle component. In some embodiments, wherein a cargo polypeptide is encoded by a cargo component. In some embodiments, a cargo polypeptide encodes a therapeutic polypeptide.

[0042] Moreover, among other things, the present disclosure provides a polynucleotide comprising: (a) a shuttle component whose nucleotide sequence is or comprises a sequence encoding a peptide shuttle; and (b) a cargo component whose nucleotide sequence is or comprises a sequence encoding a cargo polypeptide.

[0043] In some embodiments, a shuttle component is operably linked to a cargo component.

[0044] In some embodiments, a polynucleotide further comprises: (c) a barcode component whose nucleotide sequence is or comprises a sequence encoding a peptide barcode characterized in that: (i) a peptide barcode has a length within a range of 1 to 100, 5 to 50, 8 to 25, 9 to 25, or 9 to 15 amino acids; and (ii) has been determined to bind specifically to a particular group of polypeptide binders within a set of binders.

[0045] In some embodiments, a shuttle component encodes a peptide sequence having at least 80%, 85%, 90%, 91%, 92%, 93%, 94%, 95%, 96%, 97%, 98%, 99%, or 100% identity to any one of SEQ ID NOs: 8813-8894. In some embodiments, a shuttle component encodes an amino acid sequence according to any one of SEQ ID NOs: 8813-8894.

[0046] In some embodiments, an operably linked shuttle component and cargo component encode a shuttle-cargo polypeptide, wherein an encoded shuttle-cargo polypeptide has or comprises an amino acid sequence having at least 80%, 85%, 90%, 91%, 92%, 93%, 94%, 95%, 96%, 97%, 98%, 99%, or 100% identity to any one of SEQ ID NOs: 8633-8752. In some embodiments, an encoded shuttle-cargo polypeptide has or comprises an amino acid sequence according to any one of SEQ ID NOs: 8633-8752. In some embodiments, a composition is or comprises a shuttle-cargo polypeptide, wherein shuttle-cargo polypeptide is encoded by a nucleic acid sequence having at least 80%, 85%, 90%, 91%, 92%, 93%, 94%, 95%, 96%, 97%, 98%, 99%, or 100% identity to any one of SEQ ID NOs: 8513-8632. In some embodiments, a composition is or comprises a shuttle-cargo polypeptide, wherein shuttle-cargo polypeptide is encoded by a nucleic acid sequence according to any one of SEQ ID NOs: 8513-8632.

[0047] In some embodiments, a polynucleotide has or comprises a nucleic acid sequence having at least 80%, 85%, 90%, 91%, 92%, 93%, 94%, 95%, 96%, 97%, 98%, 99%, or 100% identity to any one of SEQ ID NOs: 8513-8632. In some embodiments, a polynucleotide has or comprises a nucleic acid sequence according to any one of SEQ ID NOs: 8513-8632.

[0048] In some embodiments, a cargo component further comprises one or more sequence elements, or a complement thereof, selected from a group consisting of: a promoter, an enhancer, a silencer, an insulator, a transcriptional regulatory element, a translational regulatory element, a splice donor, a splice acceptor, a transcriptional terminator, a translational start site, a translational stop site, a packaging signal, an integration signal, and any combination thereof.

[0049] In some embodiments, a cargo component comprises an internal ribosome entry site (IRES). In some embodiments, a cargo component further encodes a cleavable moiety (e.g., a self-cleaving peptide (e.g., a 2A peptide)).

[0050] In some embodiments, a nucleic acid is or comprises DNA. In some embodiments, a nucleic acid is or comprises RNA.

[0051] In some embodiments, a cargo component further comprises one or more of a capping moiety, a 5′ untranslated region (UTR), 3′ UTR, a polyadenylation (polyA) tail, or a complement thereof, or any combination thereof.

[0052] In some embodiments, a cargo component, or a portion thereof, is codon-optimized.

[0053] Moreover, among other things, the present disclosure provides a composition comprising: (a) a shuttle (e.g., a peptide shuttle described herein); and (b) a cargo, wherein a shuttle is operably linked to a cargo.

[0054] In some embodiments, a cargo is or comprises a therapeutic polypeptide. In some embodiments, a cargo is or comprises a cargo polypeptide. In some embodiments, a cargo is or comprises an antibody or a fragment thereof or a variant thereof. In some embodiments, an antibody is or comprises rituximab, ocrelizumab, ofatumumab, ublituximab, obinutuzumab, aducanumab, lecanemab, gantenerumab, donanemab, prasinezumab, anti-BACE-1 antibody 6266, anti-BACE-1 antibody YW412.8.31, Lu AF82422, or MEDI1341 or a fragment thereof or a variant thereof. In some embodiments, a fragment is or comprises one or more sequences (e.g., VL, VH, CDR sequences) associated with rituximab, ocrelizumab, ofatumumab, ublituximab, obinutuzumab, aducanumab, lecanemab, gantenerumab, donanemab, prasinezumab, anti-BACE-1 antibody 6266, anti-BACE-1 antibody YW412.8.31, Lu AF82422, or MEDI1341.

[0055] In some embodiments, an antibody has or comprises an amino acid sequence having at least 80%, 85%, 90%, 91%, 92%, 93%, 94%, 95%, 96%, 97%, 98%, 99%, or 100% identity to any one of rituximab, ocrelizumab, ofatumumab, ublituximab, obinutuzumab, aducanumab, lecanemab, gantenerumab, donanemab, prasinezumab, anti-BACE-1 antibody 6266, anti-BACE-1 antibody YW412.8.31, Lu AF82422, or MEDI1341.

[0056] In some embodiments, a fragment has or comprises a sequence having at least 80%, 85%, 90%, 91%, 92%, 93%, 94%, 95%, 96%, 97%, 98%, 99%, or 100% identity to any one more sequences (e.g., VL, VH, CDR sequences) associated with rituximab, ocrelizumab, ofatumumab, ublituximab, obinutuzumab, aducanumab, lecanemab, gantenerumab, donanemab, prasinezumab, anti-BACE-1 antibody 6266, anti-BACE-1 antibody YW412.8.31, Lu AF82422, or MEDI1341.

[0057] In some embodiments, a cargo polypeptide further comprises a localizing moiety. In some embodiments, a localizing moiety is selected from a group consisting of: a secretory signal and an intracellular localization moiety. In some embodiments, a localizing moiety is selected from a group consisting of a secretory signal and an intracellular localization moiety.

[0058] In some embodiments, a cargo polypeptide further comprises an intermediate or a pro component. In some embodiments, a cargo polypeptide further comprises a tag moiety. In some embodiments, a cargo polypeptide further comprises a liganding moiety. In some embodiments, a cargo polypeptide further comprises a stability modifying moiety. In some embodiments, a cargo polypeptide further comprises a masking moiety. In some embodiments, a cargo polypeptide further comprises an allosteric modulation moiety.

[0059] In some embodiments, a localizing moiety, tag moiety, liganding moiety, stability modifying moiety, masking moiety, or an allosteric modulation moiety is cleavable.

[0060] In some embodiments, a cargo polypeptide is or comprises a wild-type (e.g., naturally occurring) polypeptide. In some embodiments, a cargo polypeptide is or comprises a variant polypeptide. In some embodiments, a variant polypeptide is a variant of a reference polypeptide, which reference polypeptide is or comprises a wild-type (e.g., naturally occurring) polypeptide (e.g., wherein a variant polypeptide comprises an amino acid sequence that is at least 70% identical to a reference polypeptide (e.g., at least 80%, at least 85%, at least 90%, at least 95%, at least 96%, at least 97%, at least 98%, at least 99% identical to each other)).

[0061] In some embodiments, a shuttle component is operably linked to a barcode component.

[0062] In some embodiments, a nucleotide sequence of a barcode component comprises, in order from 5′ to 3′ or 3′ to 5′, one or more of: (a) a first invariant sequence (e.g., a linker sequence or a payload sequence); (b) a variant sequence that is at least 9 nucleotides long; and (c) a second invariant sequence (e.g., a linker sequence, a stop codon, or a payload sequence).

[0063] In some embodiments, a variant sequence is at least 15, 24, 27, 45, 150, or 300, nucleotides long.

[0064] In some embodiments, a nucleotide sequence of a barcode component further comprises one or more of: (d) a sequence encoding a short helical motif; (e) a sequence encoding a disordered motif; (f) an invariant sequence linking a barcode component to a cargo component.

[0065] In some embodiments, a polypeptide further comprises (c) a peptide barcode characterized in that: (i) a peptide barcode has a length within a range of 1 to 100, 5 to 50, 8 to 25, 9 to 25, or 9 to 15 amino acids; and (ii) has been determined to bind specifically to a particular group of polypeptide binders within a set of binders.

[0066] In some embodiments, a peptide barcode has an amino acid sequence according to any one of SEQ ID NOs: 5347-8398. In some embodiments, a peptide barcode is encoded by a nucleic acid sequence according to any one of SEQ ID NOs: 1148-4199.

[0067] In some embodiments, a peptide barcode has a length of 8 to 25 amino acids. In some embodiments, a peptide barcode has a length of 10 amino acids.

[0068] In some embodiments, each polypeptide binder of a group of polypeptide binders has an amino acid sequence according to any one of SEQ ID NOs: 4200-5346. In some embodiments, each polypeptide binder of a group of polypeptide binders is encoded by a nucleic acid sequence according to any one of SEQ ID NOs: 1-1147.

[0069] In some embodiments, each polypeptide binder is expressed on a phage. In some embodiments, a phage is selected from M13, T4, T7, Lambda, and filamentous phage. In some embodiments, a phage is M13.

[0070] Among other things, the present disclosure provides a fusion polynucleotide, wherein a fusion polynucleotide encodes a polypeptide described herein.

[0071] Among other things, the present disclosure provides a plurality of delivery particles, wherein one or more of the delivery particles in a plurality comprises a nucleic acid described herein.

[0072] In some embodiments, a nucleic acid in each of the delivery particles is a same. In some embodiments, delivery particles comprise at least two different nucleic acids. In some embodiments, at least two different nucleic acids comprise different cargo components.

[0073] In some embodiments, delivery particles comprise cargo components encoding at least two different cargo polypeptides.

[0074] In some embodiments, a nucleic acid is disposed within a delivery particle. In some embodiments, a nucleic acid is disposed on a surface of a delivery particle.

[0075] In some embodiments, a polynucleotide encodes a barcoded shuttle-cargo polypeptide, wherein a barcoded shuttle-cargo polypeptide, or a characteristic portion thereof, is expressed on a surface of a delivery particle (e.g., a viral particle, a lipid-based particle [e.g., cell-produced or not cell-produced, a lipid nanoparticle (LNP), a liposome, a micelle, an extracellular vesicle (e.g., exosomes, microparticles, etc.)], a polymer-based particle (e.g., PGLA), a polysaccharide-based particle, etc.).

[0076] In some embodiments, delivery particles comprise at least two different shuttles.

[0077] In some embodiments, two different shuttles are variants of a reference shuttle, which reference shuttle is or comprises a reference sequence. In some embodiments, variants comprise amino acid sequences that are at least 70% identical to each other (e.g., at least 80%, at least 85%, at least 90%, at least 95%, at least 96%, at least 97%, at least 98%, at least 99% identical to each other).

[0078] In some embodiments, delivery particles comprise one or more associated (e.g., covalently or non-covalently) targeting moieties. In some embodiments, a one or more targeting moieties are of a same type. In some embodiments, a one or more targeting moieties are of different types.

[0079] In some embodiments, a plurality of delivery particles are substantially a same type of delivery particle. In some embodiments, plurality of delivery particles comprises two or more types of delivery particles.

[0080] In some embodiments, delivery particles are or comprise a viral particle. In some embodiments, delivery particles are or comprise two or more types of viral particles. In some embodiments, viral particles are or comprise one or more of AAV delivery particles, lentivirus delivery particles, adenovirus delivery particles, herpesvirus delivery particles, and anellovirus delivery particles. In some embodiments, an AAV delivery particles are or comprise two or more serotypes (e.g., AAV2, AAV5, AAV6, AAV8, AAV9, AAV.DJ, AAV.PHP, any variant thereof, or a combination thereof).

[0081] In some embodiments, a two or more types of delivery particles are or comprise two or more types of lipid-based particles (e.g., LNPs) (e.g., having different formulations).

[0082] In some embodiments, the present disclosure provides a population of delivery particles described herein.

[0083] Among other things, the present disclosure provides a library comprising a plurality of polynucleotides as described herein.

[0084] Among other things, the present disclosure provides a fusion polypeptide, wherein a fusion polypeptide is encoded by a polynucleotide described herein.

[0085] Among other things, the present disclosure provides a cell comprising a polynucleotide described herein, a library described herein, a plurality of delivery particles described herein, or a delivery particle described herein.

[0086] Among other things, the present disclosure provides a population of cells comprising a polynucleotide described herein, a library described herein, a plurality of delivery particles described herein, or a delivery particle described herein.

[0087] Among other things, the present disclosure provides a pharmaceutical composition comprising a peptide shuttle described herein, a shuttle component described herein, a polypeptide described herein, a polynucleotide described herein, a library as described herein, a plurality of delivery particles described herein, a delivery particle described herein, or a population of delivery particles described herein.

[0088] Among other things, the present disclosure provides a kit comprising a set of peptide shuttles, wherein each peptide shuttle of a set is described herein.

[0089] Among other things, the present disclosure provides a kit comprising a set of shuttle components, wherein each shuttle component of a set described herein.

[0090] Among other things, the present disclosure provides a kit comprising a set of polypeptides, wherein each polypeptide of a set is described herein.

[0091] Among other things, the present disclosure provides a kit comprising a set of polynucleotides, wherein each polynucleotide of a set is described herein.

[0092] Moreover, among other things, the present disclosure provides a method of identifying a candidate peptide shuttle comprising steps of: a) subjecting a population of barcoded peptide shuttles to an assessment, wherein each barcoded peptide shuttle comprises: (i) a peptide shuttle, and (ii) a peptide barcode, wherein a peptide shuttle is operably linked to a peptide barcode; b) separating those members of a population that satisfy an assessment from those that do not, so that a positive population or a negative population, or both, is identified; c) contacting a positive population, or a negative population, or each population separately from a other, with a set of binders which includes at least one binder specific for each barcode in a population; and d) determining which binders bind to a separated members, thereby determining which barcoded peptide shuttle are present in a contacted population(s).

[0093] Among other things, the present disclosure provides for a method for identifying a therapeutic polypeptide or a target polypeptide to treat a disease, disorder, or condition comprising steps of: a) subjecting a population of barcoded shuttle-cargo polypeptides to an assessment, wherein each barcoded shuttle-cargo polypeptide comprises: (i) a peptide shuttle, (ii) a peptide barcode, and (iii) a cargo polypeptide wherein a peptide shuttle is operably linked to a cargo polypeptide, and a cargo polypeptide is operably linked to a peptide barcode; b) separating those members of a population that satisfy an assessment from those that do not, so that a positive population or a negative population, or both, is identified; c) contacting a positive population, or a negative population, or each population separately from a other, with a set of binders which includes at least one binder specific for each barcode in a population; and d) determining which binders bind to a separated members, thereby determining which barcoded shuttle-cargo polypeptides are present in a contacted population(s).

[0094] Among other things, the present disclosure provides for a method of pharmacokinetic screening, a method comprising: a) administering a population of barcoded therapeutic candidate polypeptides, or characteristic portion thereof, to an animal, wherein each therapeutic candidate polypeptide comprises a specific peptide barcode and a specific shuttle; b) obtaining a sample from an animal; c) purifying one or more barcoded therapeutic candidate polypeptides from a sample; d) contacting a sample with a set of binders (e.g., binding agents with binders expressed on them) which includes at least one binder specific for each barcode in a sample; and e) determining (e.g., simultaneously) a relative amounts of each binder present in a sample to determine each barcoded therapeutic candidate polypeptides' pharmacokinetic properties, biodistribution, half-life, tissue-mediated drug disposition (TMDD), epitope properties, affinity properties, thermostability properties, pH sensitivity properties, or in vivo stability.

[0095] Among other things, the present disclosure provides for a method of treatment comprising: administering a therapeutic polypeptide or nucleic acid that encodes a therapeutic polypeptide, or characteristic portion thereof, that has been determined to satisfy an assessment by a process comprising steps of: a) subjecting a population of barcoded shuttle-cargo polypeptides to an assessment, wherein each barcoded shuttle-cargo polypeptide comprises: (i) a peptide shuttle, (ii) a peptide barcode, and (iii) a cargo polypeptide wherein a peptide shuttle is operably linked to a cargo polypeptide, and a cargo polypeptide is operably linked to a peptide barcode; b) separating those members of a population that satisfy an assessment from those that do not, so that a positive population or a negative population, or both, is identified; c) contacting a positive population, or a negative population, or each population separately from a other, with a set of binders which includes at least one binder specific for each barcode in a population; and d) determining which binders bind to a separated members, thereby determining which barcoded shuttle-cargo polypeptides are present in a contacted population(s); and e) identifying a therapeutic polypeptide from a barcoded shuttle-cargo polypeptides determined to be present in a contacted population(s).

[0096] Among other things, the present disclosure provides for a method of treatment comprising: administering a therapeutic polypeptide or nucleic acid that encodes a therapeutic polypeptide, or characteristic portion thereof, that has been determined to satisfy an assessment by a process comprising steps of: a) contacting a set of binders either with a first population, with a second population, or separately with each of a first and second populations of barcoded shuttle-cargo polypeptides, wherein each barcoded shuttle-cargo polypeptide comprises: (i) a peptide shuttle, (ii) a peptide barcode, and (iii) a cargo polypeptide wherein a peptide shuttle is operably linked to a cargo polypeptide, and a cargo polypeptide is operably linked to a peptide barcode, and wherein: i) each binder binds specifically to one barcode relative to a other barcodes; and ii) a set of binders, collectively, includes a binder specific for each of a barcodes in a first and second populations, wherein a first and second populations have been separated from one another based on performance in an assessment; b) determining which binders of a set bind to a member of a first population, a second population, or both, thereby determining which barcoded shuttle-cargo polypeptides are present in a contacted population(s); and c) identifying a therapeutic polypeptide from a barcoded shuttle-cargo polypeptides determined to be present in a contacted population(s).

[0097] Among other things, the present disclosure provides for a method of treatment comprising: administering a therapeutic polypeptide, or characteristic portion thereof, wherein a therapeutic polypeptide is identified from a population of barcoded shuttle-cargo polypeptides by a method described herein.

[0098] Among other things, the present disclosure provides for a method of treatment comprising: administering a therapeutic polypeptide, or characteristic portion thereof, wherein a therapeutic polypeptide is identified from a population of barcoded shuttle-cargo polypeptides by a method described herein.

[0099] In some embodiments, the present disclosure provides of a method that comprises treating a disease, disorder, or condition, wherein the disease, disorder, or condition is a neurodegenerative disease, disorder, or condition. In some embodiments, a neurodegenerative disease, disorder, or condition is AD, PD, MSA, or MS.

[0100] In some embodiments, a therapeutic polypeptide comprises a peptide shuttle.

[0101] In some embodiments, a peptide shuttle is cleaved after delivery of a therapeutic polypeptide to a target cell, tissue, or organ. In some embodiments, a target cell, tissue, or organ is or comprises a mammalian cell, tissue, or organ. In some embodiments, a target cell, tissue, or organ is or comprises a human cell, tissue, or organ. In some embodiments, a target cell, tissue, or organ is or comprises a brain cell, tissue, or organ.

[0102] In some embodiments, multiple samples are obtained from an animal.

[0103] In some embodiments, an animal is a model for a disease, disorder, or condition. In some embodiments, a disease, disorder, or condition is cancer, autoimmune, neurodegenerative, or a pathogenic (e.g., viral/bacterial) disease, disorder, or condition. In some embodiments, a disease, disorder, or condition is a neurodegenerative disease, disorder, or condition.

[0104] In some embodiments, a disease, disorder, or condition is brain cancer (e.g., glioblastoma, metastatic brain cancers), Alzheimer's Disease (AD), Parkinson's Disease (PD), Huntington's Disease (HD), Multiple Sclerosis (MS), Bell's palsy, Cerebral palsy, Progressive Supranuclear Palsy (PSP), epilepsy, Motor Neuron Disease (MND), Amyotrophic Lateral Sclerosis (ALS), spinal muscular atrophy, Multiple System Atrophy (MSA), ataxia (e.g., spinocerebellar, Friedreich), Frontotemporal Dementia (FTD), or Lewy body disease. In some embodiments, a disease, disorder, or condition is a neurodegenerative disease, disorder, or condition. In some embodiments, a neurodegenerative disease, disorder, or condition is AD, PD, MSA, or MS.

[0105] In some embodiments, a disease, disorder, or condition is cancer or metastatic cancer.

[0106] In some embodiments, purified therapeutic candidate polypeptides are a subset of barcoded therapeutic candidate polypeptides administered to an animal.

[0107] In some embodiments, a disease, disorder, or condition a sample is blood, tissue (e.g., brain tissue), an organ (e.g., brain), or a tumor (e.g., brain tumor).

[0108] Among other things, the present disclosure provides for a composition (e.g., pharmaceutical composition) comprising one or more therapeutic polypeptides, or characteristic portion thereof, wherein a one or more therapeutic polypeptides are identified from a population of barcoded shuttle-cargo polypeptides by a method described herein.

[0109] Among other things, the present disclosure provides for a composition (e.g., pharmaceutical composition) comprising one or more barcoded shuttle-cargo polypeptides, or characteristic portion thereof, wherein a one or more barcoded shuttle-cargo polypeptides are generated by a method described herein.

[0110] Among other things, the present disclosure provides for a composition (e.g., pharmaceutical composition) comprising one or more nucleic acids encoding one or more therapeutic polypeptides, or characteristic portion thereof, wherein therapeutic polypeptides are identified from a population of barcoded shuttle-cargo polypeptides by a method described herein.

[0111] Among other things, the present disclosure provides for a method of manufacturing a composition (e.g., pharmaceutical composition) comprising one or more therapeutic polypeptides, or characteristic portion thereof, wherein a one or more therapeutic polypeptides are identified from a population of barcoded shuttle-cargo polypeptides by a method described herein.

[0112] Among other things, the present disclosure provides for a method of manufacturing a composition (e.g., pharmaceutical composition) comprising one or more nucleic acids encoding one or more therapeutic polypeptides, or characteristic portion thereof, wherein therapeutic polypeptides are identified from a population of barcoded shuttle-cargo polypeptides by a method described herein.

[0113] In some embodiments, a composition is formulated for treating or preventing a disease, disorder, or condition, wherein the disease, disorder, or condition is brain cancer (e.g., glioblastoma, metastatic brain cancers), Alzheimer's Disease (AD), Parkinson's Disease (PD), Huntington's Disease (HD), Multiple Sclerosis (MS), Bell's palsy, Cerebral palsy, Progressive Supranuclear Palsy (PSP), epilepsy, Motor Neuron Disease (MND), Amyotrophic Lateral Sclerosis (ALS), spinal muscular atrophy, Multiple System Atrophy (MSA), ataxia (e.g., spinocerebellar, Friedreich), Frontotemporal Dementia (FTD), or Lewy body disease. In some embodiments, a composition is formulated for treating or preventing a disease, disorder, or condition, wherein the disease, disorder, or condition is a neurodegenerative disease, disorder, or condition. In some embodiments, a neurodegenerative disease, disorder, or condition is AD, PD, MSA, or MS.

[0114] These, and other aspects encompassed by the present disclosure, are described in more detail below and in the claims.

### BRIEF DESCRIPTION OF THE DRAWING

[0115] FIG. 1A is a schematic of barcoded cargo as described herein, according to an illustrative embodiment. It illustrates a barcoded cargo and the corresponding DNA encoding a barcoded cargo. LN refers to “linker N terminus” and LC refers to “linker C terminus”. In some embodiments, LN and LC sequences are constant and encode amino acids that connect the cargo to the barcode. In some embodiments, LN and LC sequences are constant and are nucleic acid sequences used for modular cloning of barcodes with different cargos. In some embodiments, LN and LC sequences are flanked by Type IIS restriction site sequences.

[0116] FIG. 1B is a schematic of barcoded cargo as described herein, according to an illustrative embodiment. It illustrates a nucleic acid sequence encoding a barcode and/or a barcoded cargo. LN refers to “linker N terminus” and LC refers to “linker C terminus”. In some embodiments, LN and LC sequences are constant and encode amino acids that connect the cargo to the barcode. In some embodiments, LN and LC sequences are constant and are nucleic acid sequences used for modular cloning of barcodes with different cargos. In some embodiments, LN and LC sequences are flanked by Type US restriction site sequences.

[0117] FIG. 2 is a schematic of a method to detect and/or quantify and/or characterize cargos (e.g., cargo polypeptides) in a pool using barcodes and binding agents as described herein, according to an illustrative embodiment. A library of barcoded cargo is contacted with a library of binding agents containing identifying DNA. A wash step is applied that removes binding agents that do not associate (e.g., link (e.g., form strong linkages)) to any of the barcoded cargo, while leaving only binding agents that associate with barcodes. Following the wash, a process of DNA sequencing is applied to associated binding agents. In some embodiments, sequencing may be performed using next-generation sequencing (NGS) (e.g., as operated by an Illumina sequencer). The relative abundances of DNA sequences are reported as a computer file (e.g., .fastq data). A computer algorithm is applied on the .fastq data combined with prior biophysical characterization of the binding agents to infer the abundance of each of barcoded cargo in a pool.

[0118] FIG. 3A is a schematic for capturing a barcode as described herein, so that it may be contacted by a binding agent as described herein, according to an illustrative embodiment. It illustrates a capture scaffold that may have a barcode associated with it (e.g., immobilized on its surface), and a binding agent (e.g., phage with binder expressed on its surface (e.g., with binder DNA in phage)) is contacted to characterize biophysical interaction. In some embodiments, the biophysical characterization is a measure of dissociation constant (Kd) between the binding agent and the peptide barcode.

[0119] FIG. 3B is a schematic for capturing a barcode as described herein, so that it may be contacted by a binding agent as described herein, according to an illustrative embodiment. It is a schematic of a barcode-binder platform as described herein, according to an illustrative embodiment. The schematic shows a magnetic bead with a bead binding domain conjugated to a universally tagged (e.g., HALO, Chitin BD, Avitag (Strep), etc.) barcoded cargo. To detect the captured barcoded cargo, a binding agent (e.g., phage expressing a binder on its surface (e.g., phage with binder DNA/lib)) with known affinity to the barcode is bound to the immobilized cargo. The DNA within the phage that encodes for the binder is then amplified and subjected to NGS to detect the cargo.

[0120] FIG. 3C is a schematic for capturing a barcode as described herein, so that it may be contacted by a binding agent as described herein, according to an illustrative embodiment. It is a schematic of a barcode-binder platform as described herein, according to an illustrative embodiment. The schematic shows a magnetic bead with an Fc/Protein A conjugated barcoded cargo. To detect the captured barcoded cargo, a binding agent (e.g., phage expressing a binder on its surface (e.g., phage with binder DNA/lib) with known affinity to the barcode is bound to the immobilized cargo. The DNA within the phage that encodes for the binder is then amplified and subjected to NGS to detect the cargo.

[0121] FIG. 4 is a schematic of a method to learn the barcode fingerprint of a given barcode as described herein, according to an illustrative embodiment A peptide barcode displayed on a capture scaffold is contacted with a library of binding agents containing identifying DNA. A wash step is applied that removes binding agents that do not associate (e.g., link (e.g., form strong linkages)) with any of the barcodes, while leaving only binding agents that do associate with barcodes. After the wash, a process of DNA sequencing is applied to associated binding agents. In some embodiments, sequencing may be performed using next-generation sequencing (NGS) (e.g., as operated by an Illumina sequencer). The relative abundances of DNA sequences are reported as a computer file (e.g., in .fastq format). A computer algorithm is applied on the .fastq data to computer a barcode fingerprint. This is a vector of the relative counts of the members of the binding agent library. The method of learning a barcode fingerprint can be repeated for any barcode to identify a unique fingerprint. In some embodiments, steps 1-4 of FIG. 4 may be repeated, each time starting with a focused binding agent library in order to improve the fingerprint, for a barcode with an existing fingerprint or a new barcode. In some embodiments, the focused binding agent library is made by oligonucleotide library synthesis.

[0122] FIG. 5 is a schematic of a method to use a fingerprint matrix of a set of barcodes to determine the relative abundance of a mixture of barcodes, according to an illustrative embodiment. A set of barcodes for which individual fingerprints have been determined are combined in a known ratio and displayed (e.g., on a scaffold) for subsequent contact with a binding agent library. A binding agent library is contacted with the set of barcodes and non-specific binding agents are washed away. The specific binding agents are quantified by NGS and reported as a mixed measurement computer file (e.g., in .fastq format). These data are provided to a computer algorithm that uses the mixed measurement to learn the relative scalings of readouts relative to the original fingerprints, and assembles the scaled fingerprints together into a scaled matrix. This scaled fingerprint matrix can then be used to quantify the relative abundance of barcoded cargos.

[0123] FIGS. 6A-6C show results of quantifying a complex mixture of barcodes. Up to 6 barcodes were pooled and then measured using the decoding method described herein. FIG. 6A shows the actual relative proportion of a given barcode (left panel) and the measured relative proportion of a given barcode (right panel). Rows are individual experimental conditions, columns are barcodes, color is measurements (100% barcode=white, 0% barcode=black). FIG. 6B shows a plot of measured concentration of barcodes against actual concentration of barcodes for all experiments compared across all barcodes. Across all experiments and mixtures, a pearson of 0.95 between measured and actual proportions was calculated. FIG. 6C shows a plot of NGS count values, normalized to counts per million, for each single barcode measurement as well as mixture that were used to predict the relative abundance of each barcode within the mixture. Rows are experiments, thus all values in a row are generated from a single .fastq file and columns are binding agents. FIG. 6C discloses SEQ ID NOS. 8895-8908, respectively, in order of appearance.

[0124] FIGS. 7A-7B show a schematic of a method and data obtained using the decoding method on cargo polypeptide with barcodes contained within internal regions of the polypeptide sequences (i.e., endogenous barcodes). The schematic shows results from a synthetic pooled barcode measurement assay. FIG. 7A shows two barcoded cargos (BC1 and BC2) combined at various known concentrations in different wells of a 96-well plate. Each mixture was subjected to contact with the same pool of binding agents and decoded as described herein. Each mixture was quantified and then compared to the known values of the barcoded cargos. FIG. 7B shows relative actual proportions (X axis) of each barcode correlate to relative measured proportions (Y axis) with a pearson of 0.96

[0125] FIGS. 8A-8C show a schematic of a method to detect cargo polypeptides in serum using the barcode-binder platform as described herein, according to an illustrative embodiment. The cargo polypeptides have barcodes contained within internal regions of the polypeptide sequences (i.e., endogenous barcodes). FIG. 8A shows the barcoded therapeutic antibody agents of interest (barcoded-mAbs) were mixed at known concentrations and then added to serum. The barcoded cargos were then purified, contacted with binding agents, and subjected to decoding. FIG. 8B shows the relative actual barcoded antibody proportion (left) and the relative measured antibody proportion (right) for 3 experimental conditions, with 3 replicates each. Rows correspond to experimental condition, columns to barcodes, and color of heat-map cell is a measure of the proportion of barcoded antibody present. FIG. 8C shows a scatterplot of all the data across all experimental conditions for all barcodes with a Spearman correlation of 0.926 across all experimental measurements.

[0126] FIG. 9A shows a schematic of the experiment provided in Examples 1, 2, and 8. Six unique barcodes (BC1, BC2, BC3, BC4, BC5, and BC6) were mixed at known proportions, contacted with binding agents, and subjected to decoding as described herein. Two barcodes were experimentally held out as negative controls, but prediction for these barcodes was allowed, thus allowing determination of background prediction.

[0127] FIG. 9B and FIG. 9C show data on accuracy of decoding procedure across a 10-fold range of concentrations for the 6 unique barcodes. FIG. 9B shows plot of actual data (input) and measured data obtained after decoding for one mixture of known barcode concentrations. Input known concentrations (left bar) are shown next to predictions/measured data (right bar) for each barcode across 3 replicates. FIG. 9C shows plots of actual data (input) and measured data obtained after decoding for five different mixtures (i.e., pools 1-5) of known barcode concentrations. Input known concentrations (left bar) are shown next to predictions/measured data (right bar) for each barcode across 3 replicates.

[0128] FIGS. 10A-10C show a method and data for determining the absolute concentration of a single test barcode as described herein. FIG. 10A shows a schematic of an experiment. A single test barcode was assayed at several concentrations, while a “spike-in” barcode (i.e., a reference barcode) was added to each assay mixture at a known concentration. The various concentrations of the test barcode were contacted with binding agents and decoding was performed as described herein. The prediction of the “spike-in” barcode was used to determine the absolute amount of the test barcode being measured. FIG. 10B shows a plot of the measured absolute quantities of the test barcode (right bar) compared to known input concentrations of the test barcode (left bar) for each titration of the test barcode. The Y-axis is the logarithm of the test barcode concentration in nanograms per milliliter (ng/mL). FIG. 10C shows the results of determination of absolute concentration for 6 different barcodes. Plots show known input concentrations (left bar) and measured concentration (right bar) for six (6) different barcodes.

[0129] FIG. 11 shows a method for determining the relative abundance of two polypeptides after injection in vivo, using the binder-barcode system described herein according to an illustrative embodiment. The figure shows a graphical depiction of experimental setup. In group 1 (top), mice were injected with 1 barcoded cargo. In group 2 (middle), 2 barcoded cargos were injected. In group 3 (bottom), no barcoded cargos were injected. For each of the three groups, at 24 hours, a serum sample was taken; the barcoded cargo(s) captured using binding agents as described herein, and subjected to decoding. The measured barcoded cargo concentrations (right bar) compared to known input concentrations (left bar) for each group are shown.

[0130] FIGS. 12A-12E show determination of twenty-four (24) barcodes contained within a single mixture. FIG. 12A shows a graphical depiction of the experiment. Of 24 total barcodes the algorithm can predict, 10 were present within a mixture at equal concentrations. The rest were held out from the pool, but prediction was computationally allowed. Three (3) separate pools, which cover all possible barcodes, were measured in replicate. FIG. 12B shows prediction for the first pool. Input concentration (left bar) and measured concentration (right bar) are displayed. FIG. 12C shows predictions across all three pools. As in B, input concentration is left bar and measured is right bar. FIG. 12D shows the barcode fingerprint for the 24 barcodes used to computationally determine the relative abundance of the barcodes within the 3 pools. Columns represent barcode fingerprints, and rows represent binding agent fingerprints. FIG. 12D discloses SEQ ID NOS. 8909-8910, 8909, 8911, 8909, 8908-8909, 8912, 8909, 8913, 8909, 8914, 8909, 8915-8920, 8917, 8921-8922, 8921, 8923-8926, 8925, 8927-8928, 8927, 8929, 8927, 8930, 8927, 8925, 8927, 8931-8948, 8908, 8948-8949, 8948, 8950-8970, 8969, 8971-8975, 8974, 8976-8979, 8978-8988, 8967, 8989, 8967, 8990, 8967, 8991, 8967, 8992, 8967, 8993-8997, 8996, 8998-9000, 8999, 9001, 8999, 9002, 8999, 9003-9011, 9010, 9012-9013, 8912, 9014-9015, 9014, 9016-9027, 8898, 9028-9037, 9036, 9038-9040, 9039, 9041, 9039, 9042, 9039, 9043-9047, 9046, 9048, 9046, 9049-9057, respectively, in order of appearance. FIG. 12E shows the binding agent counts from the three pools, used to computationally determine the proportion of the pools. Rows are the binding agent counts, columns are the pools, the cell is the binding agent count within a specific pool. FIG. 12E discloses SEQ ID NOS. 8909-8910, 8909, 8911, 8909, 8908-8909, 8912, 8909, 8913, 8909, 8914, 8909, 8915-8920, 8917, 8921-8922, 8921, 8923-8926, 8925, 8927-8928, 8927, 8929, 8927, 8930, 8927, 8925, 8927, 8931-8948, 8908, 8948-8949, 8948, 8950-8970, 8969, 8971-8975, 8974, 8976-8979, 8978-8988, 8967, 8989, 8967, 8990, 8967, 8991, 8967, 8992, 8967, 8993-8997, 8996, 8998-9000, 8999, 9001, 8999, 9002, 8999, 9003-9011, 9010, 9012-9013, 8912, 9014-9015, 9014, 9016-9027, 8898, 9028-9037, 9036, 9038-9040, 9039, 9041, 9039, 9042, 9039, 9043-9047, 9046, 9048, 9046, 9049-9057, respectively, in order of appearance.

[0131] FIG. 13A is a schematic of a method to detect and/or quantify and/or characterize fourteen (14) exemplary cargos (e.g., cargo polypeptides) in a pool using a binder-barcode platform as described herein. A library of barcoded cargo was contacted with a library of binding agents containing identifying DNA (“binder-barcode particles”). Binder-barcode particles were injected as a pooled library into wild-type (wt) BALB/c mice (n=3 per timepoint) in vivo. Blood was collected from individual mice at timepoints 30 min, 6 hours, 24 hours, and 48 hours, (n=3 per timepoint), and serum was extracted. Binder-barcode particles were captured and subjected to a decoding procedure as described herein.

[0132] FIG. 13B depicts plots showing clearance of fourteen (14) exemplary binder-barcode particles injected into wild-type (wt) BALB/c mice (n=3 per timepoint) in vivo. Data were collected at time points 30 min, 6 hours, 24 hours, and 48 hours as measured by a decoding procedure described herein. Y-axis is normalized to 100% of injection volume for each exemplary binder-barcode particle. Plots shown in FIG. 13B were measured simultaneously. Each plot contains exemplary binder-barcode particles that were characterized as having certain measurable phenotypes. The left plot shows clearance (% injection) of clinical controls with known properties. The middle plot shows clearance (% injection) of exemplary binder-barcode particles that were characterized has having slow clearance properties. The right plot shows clearance (% injection) of exemplary binder-barcode particles that were characterized as having fast clearance properties.

[0133] FIG. 14A is a schematic of a method to detect and/or quantify and/or characterize thirty-six (36) cargos (e.g., cargo polypeptides) in a pool using a binder-barcode platform as described herein. A library of barcoded cargo was contacted with a library of binding agents containing identifying DNA (“binder-barcode particles”). Binder-barcode particles were injected as a pooled library into tumor bearing NSG mice, which had been previously implanted with two tumor cell lines (“Tumor 1”, “Tumor 2”), (n=2-4 per timepoint) in vivo. Blood and tumor tissue was collected from individual mice at timepoints 30 min, 6 hours, 24 hours, and 48 hours, (n=3 per timepoint). Tissue was lysed using standard lysis buffer, and serum was separated from blood. Binder-barcode particles were captured and subjected to a decoding procedure as described herein.

[0134] FIG. 14B is a heat-map of data collected from thirty-six (36) exemplary binder-barcode particles using a decoding procedure described herein. Rows identify each exemplary binder-barcode particle tested in the present example. Columns indicate data for a mouse across each time point for serum, Tumor 1, or Tumor 2. Color intensity indicates relative units of drug as measured via a decoding procedure described herein. Color intensity indicates a normalized readout of relative concentration as measured via next generation sequencing (NGS).

[0135] FIG. 14C depicts plots of binder-barcode particles described by FIG. 14B using a decoding procedure described herein. A diversity of properties was simultaneously measured. For example, binder-barcode particle P14_A5 was rapidly cleared from serum, with minimal accumulation in Tumor 1 or Tumor 2, while binder-barcode particle P17_A10 was more slowly cleared and maintained in tumor 1 over time.

[0136] FIGS. 15A-15C depict plots showing ELISA quantitation of two groups of cargos (Group 1: cargo polypeptides with no barcode; Group 2: a pool of eight (8) binder-barcode particles where each particle includes the same cargo polypeptides used in Group 1, and each particle is barcoded with a different barcode) (FIG. 15A), quantification of Group 2 using a decoding procedure described herein (FIG. 15B), and a comparison of half-life measurements for Group 1 and Group 2 quantified using ELISA and a decoding procedure described herein, respectively (FIG. 15C).

[0137] FIG. 16A is a schematic of a method to detect and/or quantify and/or characterize thirty-five (35) cargos (e.g., cargo polypeptides) in distinct pools with different number of barcoded cargos at different concentrations using a binder-barcode platform as described herein.

[0138] FIG. 16B depicts a plot showing measured barcode level (arbitrary units) versus expected barcoded-cargo level (ng) generated by arraying ninety-six (96) distinct mixtures comprising 10-35 barcoded cargo with each barcoded cargo at a known concentration between 1 pg and 1 μg. Each data point in FIG. 16B represents a comparison between a known concentration of a binder-barcode particle from one of the ninety-six (96) distinct mixtures and a concentration determined by a decoding procedure described herein.

[0139] FIG. 17 depicts a schematic of an exemplary method that provides for high throughput cargo delivery, production, screening, identification, and/or characterization as described herein. Nucleic acids comprising (1) a cargo component whose nucleotide sequence is or comprises a sequence encoding a cargo polypeptide and (2) a barcode component whose nucleotide sequence is or comprises a sequence encoding a peptide barcode are disposed within one or more delivery particles and are administered to an animal (e.g., a mammal). Functional cargos are expressed in a tissue of interest. Decoding methods are used to determine cargos and/or delivery particles with desired properties.

[0140] FIG. 18 depicts a schematic of an exemplary method that provides for tracking and/or assessment and/or quantification of different nucleic acids encoding a cargo component disposed within different types of delivery particles, according to an embodiment of the present disclosure. Two exemplary nucleic acid constructs were designed: (1) a first nucleic acid comprising (a) a cargo component encoding a cargo polypeptide comprising a secretion signal peptide, and (b) a barcode component; and (2) a second nucleic acid comprising (a) a cargo component encoding a cargo polypeptide without a secretion signal peptide, and (b) a barcode component. Each nucleic acid design was disposed within different delivery particles (e.g., AAV delivery particles, e.g., AAV2, AAV9, AAV.PHPB) that exhibit different tissue tropisms. Delivery particles were administered into mice and decoded according to methods described herein.

[0141] FIGS. 19A-19C depict bar graphs showing high-throughput screening, identification, and/or quantification of two different cargo polypeptides (with or without a secretion signal peptide) delivered via different delivery particles (AAV2, AAV9, AAV.PHPB) across different tissue types (brain, liver, serum).

[0142] FIG. 20 depicts a schematic showing that high-throughput screening provides for screening of multiple cargos, formats, targets, and tissues simultaneously in different models.

[0143] FIG. 21 depicts octet biolayer interferometry (BLI) data that show respective dissociation of cargo polypeptides against the transferrin receptor (TfR).

[0144] FIG. 22 depicts ELISA data that show respective dissociation of cargo polypeptides against the transferrin receptor (TfR).

[0145] FIG. 23 depicts a schematic of an exemplary method showing that variant cargos of a previously detected, assessed, and/or characterized cargo (e.g., wild-type cargo) may be generated and subject to further detection, assessment, and/or characterization, for example, using methods as described herein. In some embodiments, such variant cargos may possess improved functionality (e.g., improved developability, improved expression, improved affinity, etc.).

[0146] FIGS. 24A-24B depicts a plot showing a high-throughput in vivo screen of brain shuttle candidates using the binder-barcode platform described herein. FIG. 24A shows anti-TfR VHHs with unique properties including: epitope, affinity, thermostability, and pH sensitivity, that were nominated for screening in vivo. FIG. 24B shows 239 anti-TfR VHHs that were simultaneously screened for abundance in vivo in sets of 15 to 96, at doses ranging from 0.5 to 1 mg/kg, depending on batch size, in brain, serum, and other tissue using the binder-barcode platform at 24 hours.

[0147] FIG. 25 depicts a plot showing PK analysis across brain, cell-free fraction (parenchyma), serum, and muscle tissues of select screened TfR brain shuttle candidates analyzed in a multiplexed experiment using the binder-barcode platform described herein.

[0148] FIG. 26 shows a general description of an exemplary in vivo screening method to identify molecules with enhanced properties (e.g., tissue targeting properties).

[0149] FIG. 27 shows a schematic of an in vivo screen for TfR-targeted VHH shuttles in a humanized TfR mouse according to an embodiment described herein.

[0150] FIG. 28 depicts a plot showing relative quantification of all TfR shuttles tested in vivo.

[0151] FIG. 29 depicts a plot showing comparison of relative brain concentration to relative serum concentration for each TfR shuttle tested in vivo.

[0152] FIGS. 30A-30F depicts plots showing pharmacokinetics (PK) for all measured shuttles selected for follow-up from in vivo screens in various tissues of interest. FIG. 30A depicts plots showing PK for all measured shuttles in brain. FIG. 30B depicts plots showing PK for all measured shuttles in serum. FIG. 30C depicts plots showing pharmacokinetics PK for all measured shuttles in parenchyma. FIG. 30D depicts plots showing PK for all measured shuttles in muscle. FIG. 30E depicts plots showing area under curve (AUC) for brain and parenchyma tissues for TfR validation. FIG. 30F depicts plots showing comparison of AUC in serum to brain fractions for measured shuttles.

[0153] FIG. 31 shows a schematic of an overview of AI-based iteration methods, for example using Protein Language Models (PLMs) according to an embodiment described herein.

[0154] FIG. 32 shows a description of an exemplary algorithm used for AI-based sequence iteration.

[0155] FIG. 33 depicts plots showing output of in vivo screen highlighting improved shuttle variants.

[0156] FIG. 34 depicts plots showing fitness landscapes for in vitro versus in vivo measurements.

[0157] FIG. 35 depicts plots showing PK validation of improved brain uptake for shuttle TfR-1409-51 (columns 1-3 from left) and a shuttle-cargo fusion protein (e.g., a shuttle-cargo polypeptide) aBACE1-TfR-1409-51 that depletes aβ40 in brain (column 4).

[0158] FIG. 36 depicts plots showing plasma PK for exemplary aBACE-shuttle constructs described herein. Data in FIG. 36 highlights improved PK performance for aBACE shuttled by TfR-1409-51.

[0159] FIG. 37 depicts plots showing brain IgG concentration of exemplary aBACE1 constructs described herein. Data in FIG. 37 highlights increased concentration for aBACE1 with monovalent TfR-1409-51 shuttle.

[0160] FIG. 38 shows micrographs of immunofluorescent staining of shuttled aBACE1 in brain at 24 hrs.

[0161] FIGS. 39A-39B depicts plots showing PK for TfR-shuttled lecanemab variants. FIG. 39A depicts plots showing PK for TfR-shuttled lecanemab variants in brain, muscle, and serum (X-axis shows time in hours and Y-axis shows PK concentration in nM). FIG. 39B shows comparison of computed AUC values in serum to brain fractions for shuttled lecanemab variants.

[0162] FIGS. 40A-40C depicts plots showing results of in vivo screening and assessment of shuttle variants to varied targets using a binder-barcode platform as described herein. FIG. 40A shows schematic of an exemplary experimental method for shuttle target screening described herein. FIG. 40B shows brain concentration versus serum concentration for a subset of screened shuttle variants designed to target to different targets. FIG. 40C shows brain or parenchyma versus serum concentration for a subset of screened CD98 shuttles.

[0163] FIG. 41 shows a table listing affinities for shuttle-cargo fusion proteins (e.g., shuttle-cargo polypeptides) comprising lecanemab and shuttle variants directed to CD98.

[0164] FIGS. 42A-42C depicts plots showing PK data for shuttle-cargo fusion proteins (e.g., shuttle-cargo polypeptides) comprising lecanemab and shuttle variants directed to different targets. FIG. 42A depicts plots showing PK data for shuttle-cargo fusion proteins for brain tissue (X-axis shows time in hours and Y-axis shows PK concentration in nM). FIG. 42B depicts plots showing PK data for shuttle-cargo fusion proteins for serum (X-axis shows time in hours and Y-axis shows PK concentration in nM). FIG. 42C shows AUC values for shuttle-cargo fusion proteins to un-shuttled lecanemab.

[0165] FIG. 43 depicts plots showing aBeta binding with mAbs (gantenerumab and lecanemab) associated with brain shuttle VHHs.

[0166] FIGS. 44A-44D depicts plots showing anti-CD20 ADCC with mAbs fused to brain shuttle VHHs. FIG. 44A depicts plots related to rituximab and ublituximab. FIG. 44B depicts plots related to obinutuzumab and ofatumumab. FIG. 44C depicts plots related to ocrelizumab. FIG. 44D depicts plots related to ocrelizumab that is Fc-enhanced.

[0167] FIG. 45 depicts plots showing results of a transferrin (Tf) competition ELISA.

[0168] FIG. 46 depicts plots showing PK for various shuttle-cargo fusion proteins (e.g., shuttle-cargo polypeptides) comprising lecanemab and shuttle variants directed to TfR tested in the cerebrospinal fluid (CSF) of Cynomolgus monkeys (X-axis shows time in days and Y-axis shows PK concentration in nM).

[0169] FIGS. 47A-47D depict plots showing multiplexed in vivo screening data of shuttle candidates. The diagonal lines with percentages denote brain/serum ratios. FIG. 47A depicts plots related to protein-barcoded anti-TfR1 nanobodies screened in multiplex in humanized TfR1 mice (n=3), with takedown and analysis of serum and whole-brain tissue conducted at 24 hrs post-injection. A total of 250 total molecules were screened and those nanobodies detected in brain are shown. FIG. 47B depicts plots related to protein-barcoded anti-CD98hc nanobodies screened in multiplex in humanized CD98hc mice (n=3), with takedown and analysis of serum and whole-brain tissue conducted at 72 hrs post-injection. FIG. 47C depicts plots related to 295 protein-barcoded nanobodies directed to additional unique (e.g., not previously known) targets (n=7) screened in multiplex in C57 mice, with takedown and analysis of serum and whole-brain tissue conducted at 72 hrs post-injection. Each color represents a unique (e.g., not previously known) target. FIG. 47D depicts plots related to 30 protein-barcoded nanobodies against FLT1 screened in multiplex in C57 mice (n=3), with takedown and analysis of serum and whole-brain tissue conducted at 72 hrs post-injection. Three putative shuttle hits (green stars) were identified with a brain/serum ratio greater than 1%, while the remaining FLT1 shuttle candidates showed little/no brain exposure (red circles). Shuttle candidates against other targets (open circles) are left for reference.

[0170] FIG. 48 depicts plots showing in vivo PK validation of TfR1 and CD98hc shuttles with a common anti-amyloid beta (Aβ) antibody payload. Shown are shuttled and unshuttled anti-aβ mAbs with timepoints measured at 1, 6, 24, and 72 hours post-injection. The left plot shows kinetics of shuttle TfR-1409-51 with anti-aβ measured in humanized TfR1 mice. The right plot shows kinetics of shuttle CD98-11 with anti-aβ measured in humanized CD98hc mice.

[0171] FIG. 49 depicts plots showing in vivo PK validation of a unique (e.g., not previously known) target FLT1 using shuttle FLT1-49 in C57 mice. Shown are shuttled and unshuttled anti-aβ mAbs with timepoints measured at 1, 6, 24, and 72 hours post-injection. The left plot shows quantitation of FLT1-49 in whole-brain. The right plot shows quantitation of FLT1-49 in parenchymal-extracted tissues.

[0172] FIG. 50 depicts plots showing brain uptake and functional activity of an anti-BACE1 antibody alone or shuttled by MB-TfR-1409-51 versus benchmarks in humanized TfR1 mice at 24 hrs post-injection. Column 1 from left shows format of unshuttled anti-BACE1 control mAb and the shuttled MB-TfR-1409-51 construct. Column 2 from left shows levels of antibody for each construct measured in whole brain using ELISA. Column 3 from left shows levels of antibody for each construct measured in plasma using ELISA. Column 4 from left shows levels of Aβ40 for each construct measured in brain using ELISA.

[0173] FIG. 51 shows micrographs of immunofluorescence imaging of an anti-aβ antibody alone versus MB-TfR-1409-51 and multiple benchmark shuttles. Each construct was assayed in humanized TfR mice at 5 mg/kg dose and imaged using constant exposure time at 4600 ms (Cy3). The micrographs show the in vivo biodistribution of constructs in mouse hippocampus sections stained for IgG at 6 and 24 hrs post-injection. The lower plot shows four of the shuttled and unshuttled antibodies shown in the micrographs, in an ELISA readout for total IgG concentration in the brain (nM) at 1, 6, 24, and 72 hours. MB-TfR-1409-51 is differentiated by faster and more total uptake in the brain relative to the Benchmark Shuttle B and unshuttled controls tested.

[0174] FIG. 52 shows a summary of exemplary TfR, CD98, and FLT1 expression profiles. Such profiles show that FLT1 and CD98 are supportive of improved tolerability and efficacy for shuttled anti-aβ cargos.

[0175] FIGS. 53A-53B depict methodology related to conjugation of an antisense oligonucleotide to a shuttle in accordance with embodiments of the present disclosure. FIG. 53A depicts a schematic for an exemplary ASO conjugation strategy. Shuttles appended to Fc molecules are conjugated to functionalized antisense oligonucleotides (ASOs) by a two-step process, followed by a final purification step. FIG. 53B shows oligo conjugation and size exclusion chromatography of ASO conjugated shuttles. (Left) Control molecules and TfR1409-51 run on non-reducing SDS-PAGE, stained for protein (Coomassie) and DNA (SYBR gold), before and after ASO conjugation. (Right) Chromatogram from size exclusion chromatography of Fc construct after ASO conjugation to remove excess ASO.

[0176] FIG. 54 depicts a plot showing MALAT1 lncRNA knockdown in TfR expressing HEK293 cells by shuttle conjugated ASOs. qRT-PCR measured fold change of MALAT1 after treatment with unshuttled control (Fc:ASO); ASO alone; TfR1409-51 (Shuttle-Fc:ASO); Benchmark #1 (Benchmark #1:ASO). Normalized to untreated control cells and GAPDH. qRT-PCR conducted with TaqMan probes.

[0177] FIG. 55 depicts a plot showing nomination of exemplary receptor targets for brain shuttling with more favorable gene expression profiles.

[0178] FIG. 56 depicts a plot showing reticulocyte counts after injection with shuttled Anti-aβ or unshuttled Anti-aβ.

[0179] FIG. 57 shows immunofluorescence imaging of an exemplary antibody alone versus with shuttle FLT1-49.

[0180] FIG. 58 depicts plots showing levels of an anti-aβ mAb alone or fused to shuttle CD98-11 in serum and whole brain.

[0181] FIG. 59 depicts plots showing levels of an anti-aβ mAb alone or fused to shuttle FLT1-49 in serum and brain.

[0182] FIG. 60 depicts plots showing levels of an anti-aβ mAb alone or fused to shuttle FLT1-49 in serum and brain.

[0183] FIG. 61 shows representative 3D whole brain images generated using light sheet fluorescence microscopy (LSFM) and whole-organ immunohistochemistry (iDISCO) following treatment with an anti-aβ mAb alone (unshuttled), versus fused to shuttle CD98-11, or a TfR-shuttled aβ control.

[0184] FIG. 62 shows representative 3D whole brain images generated using light sheet fluorescence microscopy (LSFM) and whole-organ immunohistochemistry (iDISCO) following treatment with an anti-aβ mAb alone (unshuttled), versus fused to shuttle FLT1-49, or a TfR-shuttled aβ control.

[0185] FIG. 63 shows representative 2D sections from magnified areas of whole brains scans acquired using Light sheet fluorescence microscopy (LSFM) following treatment with an anti-aβ mAb alone (unshuttled), versus fused to shuttle FLT1-49, or a TfR-shuttled aβ control.

[0186] FIGS. 64A-64C depict plots showing levels of an IgG either alone (unshuttled) versus fused to shuttle FLT1-49 (parent) or an affinity-optimized variant FLT1-49-41.

[0187] FIG. 65 depicts a plot showing reticulocyte counts after injection with shuttled Anti-aβ or unshuttled Anti-aβ.

[0188] FIG. 66 depicts a plot showing gene expression profiles of exemplary receptor targets across various cell types and tissues.

[0189] FIG. 67 depicts a table showing acute symptoms in mice following treatment with shuttled Anti-aβ or unshuttled Anti-aβ.

[0190] FIG. 68 shows representative immunofluorescence images from brain sections twenty-four hours post-injection of either unshuttled Anti-aβ or FLT1-49-shuttled Anti-aβ.

[0191] FIG. 69 depicts plots showing pharmacokinetic (PK) profiles of selected TfR shuttles (blue) vs two unshuttled controls (gray and black) across serum brain tissue, and corresponding brain to serum ratio as measured in non-human primates.

[0192] FIG. 70 depicts plots showing pharmacokinetic (PK) profiles of exemplary TfR shuttles (blue) vs two unshuttled controls (gray and black) across serum, brain tissue, and corresponding brain to serum ratio as measured in humanized TfR mice.

[0193] FIG. 71 depicts plots showing pharmacokinetic (PK) profiles of exemplary CD98 shuttles (blue) vs two unshuttled controls (gray and black) across serum, brain tissue, and corresponding brain to serum ratio as measured in humanized CD98 mice.

[0194] FIG. 72 depicts plots showing pharmacokinetic (PK) profiles of exemplary FLT1 shuttles (blue) vs 2 unshuttled controls (gray and black) across serum, brain tissue, and corresponding brain to serum ratio as measured in humanized FLT1 mice.

### DEFINITIONS

[0195] About: The term “about”, when used herein in reference to a value, refers to a value that is similar, in context to the referenced value. In general, those skilled in the art, familiar with the context, will appreciate the relevant degree of variance encompassed by “about” in that context. For example, in some embodiments, the term “about” may encompass a range of values that within 25%, 20%, 19%, 18%, 17%, 16%, 15%, 14%, 13%, 12%, 11%, 10%, 9%, 8%, 7%, 6%, 5%, 4%, 3%, 2%, 1%, or less of the referred value.

[0196] Administer: The term “administer” or “administering”, when used herein typically refers to the administration of a composition to a subject or system to achieve delivery of an agent that is, or is included in, the composition. Those of ordinary skill in the art will be aware of a variety of routes that may, in appropriate circumstances, be utilized for administration to a subject, for example a human. For example, in some embodiments, administration may be ocular, oral, parenteral, topical, etc. In some particular embodiments, administration may be bronchial (e.g., by bronchial instillation), buccal, dermal (which may be or comprise, for example, one or more of topical to the dermis, intradermal, interdermal, transdermal, etc.), enteral, intra-arterial, intradermal, intragastric, intramedullary, intramuscular, intranasal, intraperitoneal, intrathecal, intravenous, intraventricular, within a specific organ (e.g., intrahepatic), mucosal, nasal, oral, rectal, subcutaneous, sublingual, topical, tracheal (e.g., by intratracheal instillation), vaginal, vitreal, etc. In some embodiments, administration may involve only a single dose. In some embodiments, administration may involve application of a fixed number of doses. In some embodiments, administration may involve dosing that is intermittent (e.g., a plurality of doses separated in time) and/or periodic (e.g., individual doses separated by a common period of time) dosing. In some embodiments, administration may involve continuous dosing (e.g., perfusion) for at least a selected period of time.

[0197] Affinity: As is known in the art, “affinity” is a measure of the tightness with which two or more binding partners associate with one another. Those skilled in the art are aware of a variety of assays that can be used to assess affinity, and will furthermore be aware of appropriate controls for such assays. In some embodiments, affinity is assessed in a quantitative assay. In some embodiments, affinity is assessed over a plurality of concentrations (e.g., of binding partner at a time). In some embodiments, affinity is assessed in the presence of one or more potential competitor entities (e.g., that might be present in a relevant—e.g., physiological—setting). In some embodiments, affinity is assessed relative to a reference (e.g., that has a known affinity above a particular threshold [a “positive control” reference] or that has a known affinity below a particular threshold [a “negative control” reference”]. In some embodiments, affinity may be assessed relative to a contemporaneous reference; in some embodiments, affinity may be assessed relative to a historical reference. Typically, when affinity is assessed relative to a reference, it is assessed under comparable conditions.

[0198] Agent: In general, the term “agent”, as used herein, is used to refer to an entity (e.g., for example, a lipid, metal, nucleic acid, polypeptide, polysaccharide, small molecule, etc, or complex, combination, mixture or system [e.g., cell, tissue, organism] thereof), or phenomenon (e.g., heat, electric current or field, magnetic force or field, etc.). In appropriate circumstances, as will be clear from context to those skilled in the art, the term may be utilized to refer to an entity that is or comprises a cell or organism, or a fraction, extract, or component thereof. Alternatively or additionally, as context will make clear, the term may be used to refer to a natural product in that it is found in and/or is obtained from nature. In some instances, again as will be clear from context, the term may be used to refer to one or more entities that is man-made in that it is designed, engineered, and/or produced through action of the hand of man and/or is not found in nature. In some embodiments, an agent may be utilized in isolated or pure form; in some embodiments, an agent may be utilized in crude form. In some embodiments, potential agents may be provided as collections or libraries, for example that may be screened to identify or characterize active agents within them. In some cases, the term “agent” may refer to a compound or entity that is or comprises a polymer; in some cases, the term may refer to a compound or entity that comprises one or more polymeric moieties. In some embodiments, the term “agent” may refer to a compound or entity that is not a polymer and/or is substantially free of any polymer and/or of one or more particular polymeric moieties. In some embodiments, the term may refer to a compound or entity that lacks or is substantially free of any polymeric moiety.

[0199] Amino acid: in its broadest sense, as used herein, refers to any compound and/or substance that can be incorporated into a polypeptide chain, e.g., through formation of one or more peptide bonds. In some embodiments, an amino acid has the general structure H₂N—C(H)(R)—COOH. In some embodiments, an amino acid is a naturally-occurring amino acid. In some embodiments, an amino acid is a non-natural amino acid; in some embodiments, an amino acid is a D-amino acid; in some embodiments, an amino acid is an L-amino acid. “Standard amino acid” refers to any of the twenty standard L-amino acids commonly found in naturally occurring peptides. “Nonstandard amino acid” refers to any amino acid, other than the standard amino acids, regardless of whether it is prepared synthetically or obtained from a natural source. In some embodiments, an amino acid, including a carboxy- and/or amino-terminal amino acid in a polypeptide, can contain a structural modification as compared with the general structure above. For example, in some embodiments, an amino acid may be modified by methylation, amidation, acetylation, pegylation, glycosylation, phosphorylation, and/or substitution (e.g., of the amino group, the carboxylic acid group, one or more protons, and/or the hydroxyl group) as compared with the general structure. In some embodiments, such modification may, for example, alter the circulating half-life of a polypeptide containing the modified amino acid as compared with one containing an otherwise identical unmodified amino acid. In some embodiments, such modification does not significantly alter a relevant activity of a polypeptide containing the modified amino acid, as compared with one containing an otherwise identical unmodified amino acid. As will be clear from context, in some embodiments, the term “amino acid” may be used to refer to a free amino acid; in some embodiments it may be used to refer to an amino acid residue of a polypeptide.

[0200] Animal: as used herein refers to any member of the animal kingdom. In some embodiments, “animal” refers to humans, of either sex and at any stage of development. In some embodiments, “animal” refers to non-human animals, at any stage of development. In certain embodiments, the non-human animal is a mammal (e.g., a rodent, a mouse, a rat, a rabbit, a monkey, a dog, a cat, a sheep, cattle, a primate, and/or a pig). In some embodiments, animals include, but are not limited to, mammals, birds, reptiles, amphibians, fish, insects, and/or worms. In some embodiments, an animal may be a transgenic animal, genetically engineered animal, and/or a clone.

[0201] Antibody: As used herein, the term “antibody” refers to a polypeptide that includes canonical immunoglobulin sequence elements sufficient to confer specific binding to a particular target antigen. As is known in the art, intact antibodies as produced in nature are approximately 150 kD tetrameric agents comprised of two identical heavy chain polypeptides (about 50 kD each) and two identical light chain polypeptides (about 25 kD each) that associate with each other into what is commonly referred to as a “Y-shaped” structure. Each heavy chain is comprised of at least four domains (each about 110 amino acids long)—an amino-terminal variable (VH) domain (located at the tips of the Y structure), followed by three constant domains: CH1, CH2, and the carboxy-terminal CH3 (located at the base of the Y's stem). A short region, known as the “switch”, connects the heavy chain variable and constant regions. The “hinge” connects CH2 and CH3 domains to the rest of the antibody. Two disulfide bonds in this hinge region connect the two heavy chain polypeptides to one another in an intact antibody. Each light chain is comprised of two domains—an amino-terminal variable (VL) domain, followed by a carboxy-terminal constant (CL) domain, separated from one another by another “switch”. Intact antibody tetramers are comprised of two heavy chain-light chain dimers in which the heavy and light chains are linked to one another by a single disulfide bond; two other disulfide bonds connect the heavy chain hinge regions to one another, so that the dimers are connected to one another and the tetramer is formed. Naturally-produced antibodies are also glycosylated, typically on the CH2 domain. Each domain in a natural antibody has a structure characterized by an “immunoglobulin fold” formed from two beta sheets (e.g., 3-, 4-, or 5-stranded sheets) packed against each other in a compressed antiparallel beta barrel. Each variable domain contains three hypervariable loops known as “complement determining regions” (CDR1, CDR2, and CDR3) and four somewhat invariant “framework” regions (FR1, FR2, FR3, and FR4). When natural antibodies fold, the FR regions form the beta sheets that provide the structural framework for the domains, and the CDR loop regions from both the heavy and light chains are brought together in three-dimensional space so that they create a single hypervariable antigen binding site located at the tip of the Y structure. The Fc region of naturally-occurring antibodies binds to elements of the complement system, and also to receptors on effector cells, including for example effector cells that mediate cytotoxicity. As is known in the art, affinity and/or other binding attributes of Fc regions for Fc receptors can be modulated through glycosylation or other modification. In some embodiments, antibodies produced and/or utilized in accordance with the present invention include glycosylated Fc domains, including Fc domains with modified or engineered such glycosylation. For purposes of the present invention, in certain embodiments, any polypeptide or complex of polypeptides that includes sufficient immunoglobulin domain sequences as found in natural antibodies can be referred to and/or used as an “antibody”, whether such polypeptide is naturally produced (e.g., generated by an organism reacting to an antigen), or produced by recombinant engineering, chemical synthesis, or other artificial system or methodology. In some embodiments, an antibody is polyclonal; in some embodiments, an antibody is monoclonal. In some embodiments, an antibody has constant region sequences that are characteristic of mouse, rabbit, primate, or human antibodies. In some embodiments, antibody sequence elements are humanized, primatized, chimeric, etc, as is known in the art. Moreover, the term “antibody” as used herein, can refer in appropriate embodiments (unless otherwise stated or clear from context) to any of the art-known or developed constructs or formats for utilizing antibody structural and functional features in alternative presentation. For example, embodiments, an antibody utilized in accordance with the present invention is in a format selected from, but not limited to, intact IgA, IgG, IgE or IgM antibodies; bi- or multi-specific antibodies (e.g., Zybodies®, etc); antibody fragments such as Fab fragments, Fab′ fragments, F(ab′)2 fragments, Fd′ fragments, Fd fragments, and isolated CDRs or sets thereof; single chain Fvs; polypeptide-Fc fusions; single domain antibodies (e.g., shark single domain antibodies such as IgNAR or fragments thereof); cameloid antibodies; masked antibodies (e.g., Probodies®); small Modular ImmunoPharmaceuticals (“SMIPs™”); single chain or Tandem diabodies (TandAb®); VHHs; Anticalins®; Nanobodies® minibodies; BiTE®s; ankyrin repeat proteins or DARPINs®; Avimers®; DARTs; TCR-like antibodies; Adnectins®; Affilins®; Trans-bodies®; Affibodies®; TrimerX®; MicroProteins; Fynomers®, Centyrins®; and KALBITOR®s. In some embodiments, an antibody may lack a covalent modification (e.g., attachment of a glycan) that it would have if produced naturally. In some embodiments, an antibody may contain a covalent modification (e.g., attachment of a glycan, a cargo [e.g., a detectable moiety, a therapeutic moiety, a catalytic moiety, etc], or other pendant group [e.g., poly-ethylene glycol, etc.]

[0202] Antibody agent: As used herein, the term “antibody agent” refers to an agent that specifically binds to a particular antigen. In some embodiments, the term encompasses any polypeptide or polypeptide complex that includes immunoglobulin structural elements sufficient to confer specific binding. Exemplary antibody agents include, but are not limited to monoclonal antibodies or polyclonal antibodies. In some embodiments, an antibody agent may include one or more constant region sequences that are characteristic of mouse, rabbit, primate, or human antibodies. In some embodiments, an antibody agent may include one or more sequence elements are humanized, primatized, chimeric, etc, as is known in the art. In many embodiments, the term “antibody agent” is used to refer to one or more of the art-known or developed constructs or formats for utilizing antibody structural and functional features in alternative presentation. For example, embodiments, an antibody agent utilized in accordance with the present invention is in a format selected from, but not limited to, intact IgA, IgG, IgE or IgM antibodies; bi- or multi-specific antibodies (e.g., Zybodies®, etc); antibody fragments such as Fab fragments, Fab′ fragments, F(ab′)2 fragments, Fd′ fragments, Fd fragments, and isolated CDRs or sets thereof; single chain Fvs; polypeptide-Fc fusions; single domain antibodies (e.g., shark single domain antibodies such as IgNAR or fragments thereof); cameloid antibodies; masked antibodies (e.g., Probodies®); Small Modular ImmunoPharmaceuticals (“SMIPs™”); single chain or Tandem diabodies (TandAb®); VHHs; Anticalins®; Nanobodies® minibodies; BiTE®s; ankyrin repeat proteins or DARPINs®; Avimers®; DARTs; TCR-like antibodies; Adnectins®; Affilins®; Trans-bodies®; Affibodies®; TrimerX®; MicroProteins; Fynomers®, Centyrins®; and KALBITOR®s. In some embodiments, an antibody may lack a covalent modification (e.g., attachment of a glycan) that it would have if produced naturally. In some embodiments, an antibody may contain a covalent modification (e.g., attachment of a glycan, a cargo [e.g., a detectable moiety, a therapeutic moiety, a catalytic moiety, etc], or other pendant group [e.g., poly-ethylene glycol, etc.]. In many embodiments, an antibody agent is or comprises a polypeptide whose amino acid sequence includes one or more structural elements recognized by those skilled in the art as a complementarity determining region (CDR); in some embodiments an antibody agent is or comprises a polypeptide whose amino acid sequence includes at least one CDR (e.g., at least one heavy chain CDR and/or at least one light chain CDR) that is substantially identical to one found in a reference antibody. In some embodiments an included CDR is substantially identical to a reference CDR in that it is either identical in sequence or contains between 1-5 amino acid substitutions as compared with the reference CDR. In some embodiments an included CDR is substantially identical to a reference CDR in that it shows at least 85%, 86%, 87%, 88%, 89%, 90%, 91%, 92%, 93%, 94%, 95%, 96%, 97%, 98%, 99%, or 100% sequence identity with the reference CDR. In some embodiments an included CDR is substantially identical to a reference CDR in that it shows at least 96%, 96%, 97%, 98%, 99%, or 100% sequence identity with the reference CDR. In some embodiments an included CDR is substantially identical to a reference CDR in that at least one amino acid within the included CDR is deleted, added, or substituted as compared with the reference CDR but the included CDR has an amino acid sequence that is otherwise identical with that of the reference CDR. In some embodiments an included CDR is substantially identical to a reference CDR in that 1-5 amino acids within the included CDR are deleted, added, or substituted as compared with the reference CDR but the included CDR has an amino acid sequence that is otherwise identical to the reference CDR. In some embodiments an included CDR is substantially identical to a reference CDR in that at least one amino acid within the included CDR is substituted as compared with the reference CDR but the included CDR has an amino acid sequence that is otherwise identical with that of the reference CDR. In some embodiments an included CDR is substantially identical to a reference CDR in that 1-5 amino acids within the included CDR are deleted, added, or substituted as compared with the reference CDR but the included CDR has an amino acid sequence that is otherwise identical to the reference CDR. In some embodiments, an antibody agent is or comprises a polypeptide whose amino acid sequence includes structural elements recognized by those skilled in the art as an immunoglobulin variable domain. In some embodiments, an antibody agent is a polypeptide protein having a binding domain which is homologous or largely homologous to an immunoglobulin-binding domain.

[0203] Associated: Two events or entities are “associated” with one another, as that term is used herein, if the presence, level, degree, type and/or form of one is correlated with that of the other. For example, a particular entity (e.g., polypeptide, genetic signature, metabolite, microbe, etc) is considered to be associated with a particular disease, disorder, or condition, if its presence, level and/or form correlates with incidence of and/or susceptibility to the disease, disorder, or condition (e.g., across a relevant population). In some embodiments, two or more entities are physically “associated” with one another if they interact, directly or indirectly, so that they are and/or remain in physical proximity with one another. In some embodiments, two or more entities that are physically associated with one another are covalently linked to one another; in some embodiments, two or more entities that are physically associated with one another are not covalently linked to one another but are non-covalently associated, for example by means of hydrogen bonds, van der Waals interaction, hydrophobic interactions, magnetism, and combinations thereof.

[0204] Barcode, Barcode component, or Barcode peptide or Peptide barcode: As used herein, the term “barcode” refers to a sequence (nucleic acid or amino acid), which associates (e.g., covalently or non-covalently) with a cargo as described herein. In some embodiments, a nucleic acid comprises a “barcode component” encoding a peptide barcode. In some embodiments, a barcode component is operably linked to a cargo component that encodes a cargo polypeptide. In some embodiments, a peptide barcode is linked to cargo polypeptide. As described herein a barcode associates with a binder with known specificity and affinity. In some embodiments, a barcode binds to a specific antibody-agent. In some embodiments, a barcode may be contained within a specific cargo of interest. In some embodiments, a barcode may be terminal to a specific cargo of interest. In some embodiments, a barcode may be synthetic. In some embodiments, a barcode may be designed. For example, a barcode sequence may be ordered as a DNA polynucleotide and cloned into a cargo of interest using methods of molecular cloning known to a person of ordinary skill in the art.

[0205] Binder: As used herein, the term “binder” or “binder moiety” refers to a polypeptide sequence, which associates with a barcode with known specificity and affinity. In some embodiments, a binder is or comprises an antibody agent. In some embodiments, a binder is expressed on a surface of a binding agent. In some embodiments, a binder may bind to one or more barcodes.

[0206] Binding: It will be understood that the term “binding” or “bind”, as used herein, typically refers to a non-covalent association between or among two or more entities. “Direct” binding involves physical contact between entities or moieties, indirect binding involves physical interaction by way of physical contact with one or more intermediate entities. Binding between two or more entities can typically be assessed in any of a variety of contexts—including where interacting entities or moieties are studied in isolation or in the context of more complex systems (e.g., while covalently or otherwise associated with a carrier entity and/or in a biological system or cell).

[0207] Binding agent: In general, the term “binding agent” is used herein to refer to any entity that binds to a target of interest as described herein (e.g., a barcode, a barcoded target, etc.). In many embodiments, a binding agent of interest is one that binds specifically with its target in that it discriminates its target from other potential binding partners in a particular interaction context. In general, a binding agent may be or comprise an entity of any chemical class (e.g., polymer, non-polymer, small molecule, polypeptide, carbohydrate, lipid, nucleic acid, etc) or biological class (e.g., bacteria, phage, ribosome, mRNA, DNA, etc.). In some embodiments, a binding agent is a single chemical entity. In some embodiments, a binding agent is a complex of two or more discrete chemical entities associated with one another under relevant conditions by non-covalent interactions. For example, those skilled in the art will appreciate that in some embodiments, a binding agent may comprise a “generic” binding moiety (e.g., one of biotin/avidin/streptavidin and/or a class-specific antibody) and a “specific” binding moiety (e.g., an antibody or aptamers with a particular molecular target) that is linked to the partner of the generic biding moiety. In some embodiments, such an approach can permit modular assembly of multiple binding agents through linkage of different specific binding moieties with the same generic binding moiety partner. In some embodiments, binding agents are or comprise phages. In some embodiments, binding agents are or comprise polypeptides (including, e.g., antibodies or antibody fragments). In some embodiments, binding agents are or comprise small molecules. In some embodiments, binding agents are or comprise nucleic acids. In some embodiments, binding agents are or comprise aptamers. In some embodiments, binding agents are polymers; in some embodiments, binding agents are not polymers. In some embodiments, binding agents are non-polymeric in that they lack polymeric moieties. In some embodiments, binding agents are or comprise carbohydrates. In some embodiments, binding agents are or comprise lectins. In some embodiments, binding agents are or comprise peptidomimetics. In some embodiments, binding agents are or comprise scaffold proteins. In some embodiments, binding agents are or comprise mimeotopes. In some embodiments, binding agents are or comprise stapled peptides. In certain embodiments, binding agents are or comprise nucleic acids, such as DNA or RNA.

[0208] Biological Sample: As used herein, the term “biological sample” typically refers to a sample obtained or derived from a biological source (e.g., a tissue or organism or cell culture) of interest, as described herein. In some embodiments, a source of interest comprises an organism, such as an animal or human. In some embodiments, a biological sample is or comprises biological tissue or fluid. In some embodiments, a biological sample may be or comprise bone marrow, blood; blood cells; ascites; tissue or fine needle biopsy samples; cell-containing body fluids; free floating nucleic acids; sputum; saliva; urine; cerebrospinal fluid, peritoneal fluid; pleural fluid; feces; lymph; gynecological fluids; skin swabs; vaginal swabs; oral swabs; nasal swabs; washings or lavages such as a ductal lavages or broncheoalveolar lavages; aspirates; scrapings; bone marrow specimens; tissue biopsy specimens; surgical specimens; feces, other body fluids, secretions, and/or excretions; and/or cells therefrom, etc. In some embodiments, a biological sample is or comprises cells obtained from an individual. In some embodiments, obtained cells are or include cells from an individual from whom the sample is obtained. In some embodiments, a sample is a “primary sample” obtained directly from a source of interest by any appropriate means. For example, in some embodiments, a primary biological sample is obtained by methods selected from the group consisting of biopsy (e.g., fine needle aspiration or tissue biopsy), surgery, collection of body fluid (e.g., blood, lymph, feces etc.), etc. In some embodiments, as will be clear from context, the term “sample” refers to a preparation that is obtained by processing (e.g., by removing one or more components of and/or by adding one or more agents to) a primary sample. For example, filtering using a semi-permeable membrane. Such a “processed sample” may comprise, for example nucleic acids or proteins extracted from a sample or obtained by subjecting a primary sample to techniques such as amplification or reverse transcription of mRNA, isolation and/or purification of certain components, etc.

[0209] Cargo, Cargo component, or Cargo polypeptide: As used herein, the term “cargo” refers to a payload, which may be associated (e.g., covalently or non-covalently) to a barcode and/or a shuttle. In some embodiments, a cargo comprises a nucleic acid (referred to herein as a “cargo component”) encoding a cargo polypeptide. In some embodiments, a cargo is or comprises a cargo component (e.g., that encodes a cargo polypeptide). In some embodiments, a cargo is or comprises a cargo polypeptide (e.g., encoded by a cargo component). In some embodiments, a cargo component is operably linked to a nucleic acid referred to herein as a “barcode component”. In some embodiments, a barcode component encodes a peptide barcode. In some embodiments, a peptide barcode is linked (e.g., covalently and/or non-covalently) to a cargo polypeptide. In some embodiments, a cargo component is operably linked to a nucleic acid referred to herein as a “shuttle component”. In some embodiments, a shuttle component encodes a peptide shuttle (or “transporter”). In some embodiments, a peptide shuttle is linked (e.g., covalently and/or non-covalently) to a cargo polypeptide. In some embodiments, a peptide shuttle is linked (e.g., covalently and/or non-covalently) to a peptide barcode. In some embodiments, a cargo polypeptide is detected in a pool of polypeptides. In some embodiments, a cargo polypeptide is an unmodified polypeptide that is to be detected in a pool of polypeptides without association of a peptide barcode. In some embodiments, a cargo polypeptide is a modified polypeptide that is to be detected in a pool of polypeptides. In some embodiments, a cargo polypeptide may not be associated with a barcode (e.g., a peptide barcode). In some embodiments, a cargo polypeptide may not be associated with a shuttle (e.g., a peptide shuttle). In some embodiments, a cargo comprises one or more sequences (nucleic acid sequence or amino acid sequence) that modify expression of a cargo polypeptide. In some embodiments, such one or more sequences are associated (directly or indirectly) with a barcode throughout a period of assessment of cargo polypeptides, as described herein.

[0210] CDR: As used herein, “CDR” refers to a complementarity determining region within an antibody variable region. There are three CDRs in each of the variable regions of the heavy chain and the light chain, which are designated CDR1, CDR2 and CDR3, for each of the variable regions. A “set of CDRs” or “CDR set” refers to a group of three or six CDRs that occur in either a single variable region capable of binding the antigen or the CDRs of cognate heavy and light chain variable regions capable of binding the antigen. Certain systems have been established in the art for defining CDR boundaries (e.g., Kabat, Chothia, etc.); those skilled in the art appreciate the differences between and among these systems and are capable of understanding CDR boundaries to the extent required to understand and to practice the claimed invention.

[0211] Characteristic portion: As used herein, the term “characteristic portion,” in the broadest sense, refers to a portion of a substance whose presence (or absence) correlates with presence (or absence) of a particular feature, attribute, or activity of the substance. In some embodiments, a characteristic portion of a substance is a portion that is found in a given substance and in related substances that share a particular feature, attribute or activity, but not in those that do not share the particular feature, attribute or activity. In some embodiments, a characteristic portion shares at least one functional characteristic with the intact substance. For example, in some embodiments, a “characteristic portion” of a protein or polypeptide is one that contains a continuous stretch of amino acids, or a collection of continuous stretches of amino acids, that together are characteristic of a protein or polypeptide. In some embodiments, each such continuous stretch generally contains at least 2, 5, 10, 15, 20, 50, or more amino acids. In general, a characteristic portion of a substance (e.g., of a protein, antibody, etc.) is one that, in addition to a sequence and/or structural identity specified above, shares at least one functional characteristic with the relevant intact substance. In some embodiments, a characteristic portion may be biologically active.

[0212] Characteristic sequence: As used herein, the term “characteristic sequence” is a sequence that is found in all members of a family of polypeptides or nucleic acids, and therefore can be used by those of ordinary skill in the art to define members of the family.

[0213] Characteristic sequence dement: As used herein, the phrase “characteristic sequence element” refers to a sequence element found in a polymer (e.g., in a polypeptide or nucleic acid) that represents a characteristic portion of that polymer. In some embodiments, presence of a characteristic sequence element correlates with presence or level of a particular activity or property of a polymer. In some embodiments, presence (or absence) of a characteristic sequence element defines a particular polymer as a member (or not a member) of a particular family or group of such polymers. A characteristic sequence element typically comprises at least two monomers (e.g., amino acids or nucleotides). In some embodiments, a characteristic sequence element includes at least 2, 3, 4, 5, 6, 7, 8, 9, 10, 11, 12, 13, 14, 15, 20, 25, 30, 35, 40, 45, 50, or more monomers (e.g., contiguously linked monomers). In some embodiments, a characteristic sequence element includes at least first and second stretches of contiguous monomers spaced apart by one or more spacer regions whose length may or may not vary across polymers that share a sequence element.

[0214] Combination therapy: As used herein, the term “combination therapy” refers to those situations in which a subject is simultaneously exposed to two or more therapeutic regimens (e.g., two or more therapeutic agents). In some embodiments, two or more agents may be administered simultaneously. In some embodiments, two or more agents may be administered sequentially. In some embodiments, two or more agents may be administered in overlapping dosing regimens.

[0215] Comparable. As used herein, the term “comparable” refers to two or more agents, entities, situations, sets of conditions, that may not be identical to one another but that are sufficiently similar to permit comparison there between so that one skilled in the art will appreciate that conclusions may reasonably be drawn based on differences or similarities observed. In some embodiments, comparable sets of conditions, circumstances, individuals, or populations are characterized by a plurality of substantially identical features and one or a small number of varied features. Those of ordinary skill in the art will understand, in context, what degree of identity is required in any given circumstance for two or more such agents, entities, situations, sets of conditions, to be considered comparable. For example, those of ordinary skill in the art will appreciate that sets of circumstances, individuals, or populations are comparable to one another when characterized by a sufficient number and type of substantially identical features to warrant a reasonable conclusion that differences in results obtained or phenomena observed under or with different sets of circumstances, individuals, or populations are caused by or indicative of the variation in those features that are varied.

[0216] Comprising: A composition or method described herein as “comprising” one or more named elements or steps is open-ended, meaning that the named elements or steps are essential, but other elements or steps may be added within the scope of the composition or method. To avoid prolixity, it is also understood that any composition or method described as “comprising” (or which “comprises”) one or more named elements or steps also describes the corresponding, more limited composition or method “consisting essentially of” (or which “consists essentially of”) the same named elements or steps, meaning that the composition or method includes the named essential elements or steps and may also include additional elements or steps that do not materially affect the basic and novel characteristic(s) of the composition or method. It is also understood that any composition or method described herein as “comprising” or “consisting essentially of” one or more named elements or steps also describes the corresponding, more limited, and closed-ended composition or method “consisting of” (or “consists of”) the named elements or steps to the exclusion of any other unnamed element or step. In any composition or method disclosed herein, known or disclosed equivalents of any named essential element or step may be substituted for that element or step.

[0217] Decoding: As used herein, the term “decoding”, refers to a laboratory and/or bioinformatics process of identifying and quantifying a unique set of amino acids within a barcode. In some embodiments, such identification and quantification is achieved using nucleic acid (e.g., DNA) counts form a sequencing experiment and measuring an abundance of binder counts. In some embodiments, previously measured fingerprints (e.g., binder fingerprint or barcode fingerprint) are used to determine the relationship between an unknown barcode mixture, which is being decoded, for example, by comparing to a previously known mixture's binder counts, across binders with known and varying affinities to several barcodes within the pool.

[0218] Designed. As used herein, the term “designed” refers to an agent (i) whose structure is or was selected by the hand of man; (ii) that is produced by a process requiring the hand of man; and/or (iii) that is distinct from natural substances and other known agents.

[0219] Determine: Many methodologies described herein include a step of “determining”. Those of ordinary skill in the art, reading the present specification, will appreciate that such “determining” can utilize or be accomplished through use of any of a variety of techniques available to those skilled in the art, including for example specific techniques explicitly referred to herein. In some embodiments, determining involves manipulation of a physical sample. In some embodiments, determining involves consideration and/or manipulation of data or information, for example utilizing a computer or other processing unit adapted to perform a relevant analysis. In some embodiments, determining involves receiving relevant information and/or materials from a source. In some embodiments, determining involves comparing one or more features of a sample or entity to a comparable reference.

[0220] Engineered: In general, the term “engineered” refers to the aspect of having been manipulated by the hand of man. For example, in some embodiments, a small molecule may be considered to be engineered if its structure and/or production is designed and/or implemented by the hand of man. Analogously, in some embodiments, a polynucleotide may be considered to be “engineered” when two or more sequences, that are not linked together in that order in nature, are manipulated by the hand of man to be directly linked to one another in the engineered polynucleotide. For example, in some embodiments of the present invention, an engineered polynucleotide comprises a regulatory sequence that is found in nature in operative association with a first sequence (e.g., coding sequence) but not in operative association with a second sequence (e.g., coding sequence), is linked by the hand of man so that it is operatively associated with the second sequence. Comparably, a cell or organism is considered to be “engineered” if it has been manipulated so that its genetic information is altered (e.g., new genetic material not previously present has been introduced, for example by transformation, mating, somatic hybridization, transfection, transduction, or other mechanism, or previously present genetic material is altered or removed, for example by substitution or deletion mutation, or by mating protocols). As is common practice and is understood by those in the art, expression products of an engineered polynucleotide, and/or progeny of an engineered polynucleotide or cell are typically still referred to as “engineered” even though the actual manipulation was performed on a prior entity.

[0221] Expression: As used herein, “expression” of a nucleic acid sequence refers to one or more of the following events: (1) production of an RNA template from a DNA sequence (e.g., by transcription); (2) processing of an RNA transcript (e.g., by splicing, editing, 5′ cap formation, and/or 3′ end formation); (3) translation of an RNA into a polypeptide or protein; and/or (4) post-translational modification of a polypeptide or protein.

[0222] Fingerprint: As used herein, the term “fingerprint” refers to the counts of one or more unknown agents that a known agent may bind to or be associated with. In some embodiments, a fingerprint may be for a known barcode or barcode mixture. In some embodiments, a fingerprint may be for a known binder or binder mixture. For example, in some embodiments, a fingerprint (e.g., barcode fingerprint) may refer to the counts of one or more binders (e.g., determined through sequencing analysis) to bind specifically to a known barcode or barcode mixture. That is, in some embodiments, a fingerprint for a barcode refers to the counts of one or more binders, some of which may have high affinity for the barcode, and some of which may have low affinity for the barcode. In some embodiments, a fingerprint may be used in the decoding process, which process is used to determine the relative or absolute abundance of a given barcode within a pool of barcodes. As is understood to a person of ordinary skill in the art a fingerprint may be determined for a known barcode or barcode mixture, or for a known binder or binder mixture. For example, in some embodiments, a fingerprint (e.g., binder fingerprint) may refer to the counts of one or more barcodes (e.g., determined through sequencing analysis) that bind specifically to a known binder or binder mixture. That is, in some embodiments, a fingerprint for a binder refers to the counts of one or more barcodes, some of which may have high affinity for the binder, and some of which may have low affinity for the binder. Accordingly, a fingerprint may also be used in the decoding process, in some embodiments, to determine the relative or absolute abundance of a given binder within a pool of binders.

[0223] Fragment: A “fragment” of a material or entity as described herein has a structure that includes a discrete portion of the whole, but lacks one or more moieties found in the whole. In some embodiments, a fragment consists of such a discrete portion. In some embodiments, a fragment consists of or comprises a characteristic structural element or moiety found in the whole. In some embodiments, a polymer fragment comprises or consists of at least 3, 4, 5, 6, 7, 8, 9, 10, 11, 12, 13, 14, 15, 16, 17, 18, 19, 20, 25, 30, 35, 40, 45, 50, 55, 60, 65, 70, 75, 80, 85, 90, 95, 100, 110, 120, 130, 140, 150, 160, 170, 180, 190, 200, 210, 220, 230, 240, 250, 275, 300, 325, 350, 375, 400, 425, 450, 475, 500 or more monomeric units (e.g., residues) as found in the whole polymer. In some embodiments, a polymer fragment comprises or consists of at least about 5%, 10%, 15%, 20%, 25%, 30%, 25%, 40%, 45%, 50%, 55%, 60%, 65%, 70%, 75%, 80%, 85%, 90%, 95%, 96%, 97%, 98%, 99% or more of the monomeric units (e.g., residues) found in the whole polymer. The whole material or entity may in some embodiments be referred to as the “parent” of the whole.

[0224] Human: In some embodiments, a human is an embryo, a fetus, an infant, a child, a teenager, an adult, or a senior citizen.

[0225] Identity, identical: As used herein, the terms “identity” or “identical” refers to overall relatedness between polymeric molecules, e.g., between nucleic acid molecules (e.g., DNA molecules and/or RNA molecules) and/or between polypeptide molecules. Methods for calculation of a percent identity as between two provided sequences are known in the art. Calculation of a percent identity of two nucleic acid or polypeptide sequences, for example, can be performed by aligning two sequences (or a complement of one or both sequences) for optimal comparison purposes (e.g., gaps can be introduced in one or both of a first and a second sequences for optimal alignment and non-identical sequences can be disregarded for comparison purposes). Nucleotides or amino acids at corresponding positions are then compared. When a position in the first sequence is occupied by a same residue (e.g., nucleotide or amino acid) as a corresponding position in the second sequence, then molecules are identical at that position. Percent identity between two sequences is a function of a number of identical positions shared by the sequences and, optionally, taking into account a number of gaps and a length of each gap, which may need to be introduced for optimal alignment of two sequences. Comparison of sequences and determination of percent identity between two sequences can be accomplished using a computational algorithm, such as BLAST (basic local alignment search tool).

[0226] Improve, increase, inhibit or reduce: As used herein, the terms “improve”, “increase”, “inhibit’, “reduce”, or grammatical equivalents thereof, indicate values that are relative to a baseline or other reference measurement. In some embodiments, an appropriate reference measurement may be or comprise a measurement in a particular system (e.g., in a single individual) under otherwise comparable conditions absent presence of (e.g., prior to and/or after) a particular agent or treatment, or in presence of an appropriate comparable reference agent. In some embodiments, an appropriate reference measurement may be or comprise a measurement in comparable system known or expected to respond in a particular way, in presence of the relevant agent or treatment. In some embodiments, “improve”, “increase”, “inhibit”, “reduce” may be referred to collectively as “modify”.

[0227] Invariant sequence: As used herein, the term “invariant sequence” indicates a sequence that is substantially identical in a library of nucleic acids. In some embodiments, each nucleic acid comprises, among other things, a barcode component. As an example, in some embodiments, a barcode component may further comprise one or more of: (1) a nucleic acid sequence encoding a short helical motif, (2) a nucleic acid encoding a disordered motif, and (3) an invariant sequence linking the barcode component to the cargo component. A nucleic acid sequence encoding a short helical motif and a nucleic acid encoding a disordered motif may each respectively vary across the library of nucleic acids. In contrast, each invariant sequence in a pool of nucleic acids is substantially identical.

[0228] In vitro: The term “in vitro” as used herein refers to events that occur in an artificial environment, e.g., in a test tube or reaction vessel, in cell culture, etc., rather than within a multi-cellular organism.

[0229] In vivo: as used herein refers to events that occur within a multi-cellular organism, such as a human and a non-human animal. In the context of cell-based systems, the term may be used to refer to events that occur within a living cell (as opposed to, for example, in vitro systems).

[0230] Library: The term “library” as used herein refers to a mixture of one or more distinct molecules. In some embodiments, all elements of a library share one or more common components. In some embodiments, all elements of a library share no common components. In some embodiments, one or more elements of a library are distinguished by one or more unique components. In some embodiments, as may be apparent from the context, a library may refer to a mixture of binding agents. In some embodiments, a library may be a phage library. In some embodiments, for example, a phage library may consist of phage with distinct binders displayed on (e.g., on a surface) of the phage and encapsulating DNA encoding for this binder within the phage. In some embodiments, a library may refer to a mixture of barcoded cargo proteins. In some embodiments, a library may refer to a mixture of barcodes (e.g., peptide barcodes).

[0231] Linker: as used herein, is used to refer to that portion of a multi-element agent that connects different elements to one another. For example, those of ordinary skill in the art appreciate that a polypeptide whose structure includes two or more functional or organizational domains often includes a stretch of amino acids between such domains that links them to one another. In some embodiments, a polypeptide comprising a linker element has an overall structure of the general form S1-L-S2, wherein S1 and S2 may be the same or different and represent two domains associated with one another by the linker. In some embodiments, a polyptide linker is at least 2, 3, 4, 5, 6, 7, 8, 9, 10, 11, 12, 13, 14, 15, 16, 17, 18, 19, 20, 21, 22, 23, 24, 25, 26, 27, 28, 29, 30, 35, 40, 45, 50, 55, 60, 65, 70, 75, 80, 85, 90, 95, 100 or more amino acids in length. In some embodiments, a linker is characterized in that it tends not to adopt a rigid three-dimensional structure, but rather provides flexibility to the polypeptide. A variety of different linker elements that can appropriately be used when engineering polypeptides (e.g., fusion polypeptides) known in the art (see e.g., Holliger, P., et al. (1993) Proc. Natl. Acad. Sci. USA 90:6444-6448; Poljak, R J., et al. (1994) Structure 2: 1 121-1123).

[0232] Nucleic acid: As used herein, in its broadest sense, refers to any compound and/or substance that is or can be incorporated into an oligonucleotide chain. In some embodiments, a nucleic acid is a compound and/or substance that is or can be incorporated into an oligonucleotide chain via a phosphodiester linkage. As will be clear from context, in some embodiments, “nucleic acid” refers to an individual nucleic acid residue (e.g., a nucleotide and/or nucleoside); in some embodiments, “nucleic acid” refers to an oligonucleotide chain comprising individual nucleic acid residues. In some embodiments, a “nucleic acid” is or comprises RNA; in some embodiments, a “nucleic acid” is or comprises DNA. In some embodiments, a nucleic acid is, comprises, or consists of one or more natural nucleic acid residues. In some embodiments, a nucleic acid is, comprises, or consists of one or more nucleic acid analogs. In some embodiments, a nucleic acid analog differs from a nucleic acid in that it does not utilize a phosphodiester backbone. For example, in some embodiments, a nucleic acid is, comprises, or consists of one or more “peptide nucleic acids”, which are known in the art and have peptide bonds instead of phosphodiester bonds in the backbone, are considered within the scope of the present invention. Alternatively or additionally, in some embodiments, a nucleic acid has one or more phosphorothioate and/or 5′-N-phosphoramidite linkages rather than phosphodiester bonds. In some embodiments, a nucleic acid is, comprises, or consists of one or more natural nucleosides (e.g., adenosine, thymidine, guanosine, cytidine, uridine, deoxyadenosine, deoxythymidine, deoxy guanosine, and deoxycytidine). In some embodiments, a nucleic acid is, comprises, or consists of one or more nucleoside analogs (e.g., 2-aminoadenosine, 2-thiothymidine, inosine, pyrrolo-pyrimidine, 3-methyl adenosine, 5-methylcytidine, C-5 propynyl-cytidine, C-5 propynyl-uridine, 2-aminoadenosine, C5-bromouridine, C5-fluorouridine, C5-iodouridine, C5-propynyl-uridine, C5-propynyl-cytidine, C5-methylcytidine, 2-aminoadenosine, 7-deazaadenosine, 7-deazaguanosine, 8-oxoadenosine, 8-oxoguanosine, 0(6)-methylguanine, 2-thiocytidine, methylated bases, intercalated bases, and combinations thereof). In some embodiments, a nucleic acid comprises one or more modified sugars (e.g., 2′-fluororibose, ribose, 2′-deoxyribose, arabinose, and hexose) as compared with those in natural nucleic acids. In some embodiments, a nucleic acid has a nucleotide sequence that encodes a functional gene product such as an RNA or protein. In some embodiments, a nucleic acid includes one or more introns. In some embodiments, nucleic acids are prepared by one or more of isolation from a natural source, enzymatic synthesis by polymerization based on a complementary template (in vivo or in vitro), reproduction in a recombinant cell or system, and chemical synthesis. In some embodiments, a nucleic acid is at least 3, 4, 5, 6, 7, 8, 9, 10, 15, 20, 25, 30, 35, 40, 45, 50, 55, 60, 65, 70, 75, 80, 85, 90, 95, 100, 1 10, 120, 130, 140, 150, 160, 170, 180, 190, 20, 225, 250, 275, 300, 325, 350, 375, 400, 425, 450, 475, 500, 600, 700, 800, 900, 1000, 1500, 2000, 2500, 3000, 3500, 4000, 4500, 5000 or more residues long. In some embodiments, a nucleic acid is partly or wholly single stranded; in some embodiments, a nucleic acid is partly or wholly double stranded. In some embodiments a nucleic acid has a nucleotide sequence comprising at least one element that encodes, or is the complement of a sequence that encodes, a polypeptide. In some embodiments, a nucleic acid has enzymatic activity.

[0233] Operably linked: As used herein, refers to a juxtaposition wherein the components described are in a relationship permitting them to function in their intended manner. A control element “operably linked” to a functional element is associated in such a way that expression and/or activity of the functional element is achieved under conditions compatible with the control element. In some embodiments, “operably linked” control elements are contiguous (e.g., covalently linked) with coding elements of interest; in some embodiments, control elements act in trans to or otherwise at a from the functional element of interest. In some embodiments, “operably linked” refers to functional linkage between a regulatory sequence and a heterologous nucleic acid sequence resulting in expression of the latter. For example, a first nucleic acid sequence is operably linked with a second nucleic acid sequence when the first nucleic acid sequence is placed in a functional relationship with the second nucleic acid sequence. In some embodiments, for example, a functional linkage may include transcriptional control. For instance, a promoter is operably linked to a coding sequence if the promoter affects the transcription or expression of the coding sequence. Operably linked DNA sequences can be contiguous with each other and, e.g., where necessary to join two protein coding regions, are in the same reading frame. In some embodiments, a cargo component is operably linked to a barcode component.

[0234] Peptide: The term “peptide” as used herein refers to a polypeptide that is typically relatively short, for example having a length of less than about 100 amino acids, less than about 50 amino acids, less than about 40 amino acids less than about 30 amino acids, less than about 25 amino acids, less than about 20 amino acids, less than about 15 amino acids, or less than 10 amino acids.

[0235] Pharmaceutical composition: As used herein, the term “pharmaceutical composition” refers to a composition in which an active agent is formulated together with one or more pharmaceutically acceptable carriers. In some embodiments, an active agent is present in unit dose amount appropriate for administration in a therapeutic regimen that shows a statistically significant probability of achieving a predetermined therapeutic effect when administered to a relevant population. In some embodiments, a pharmaceutical composition may be specially formulated for administration in solid or liquid form, including those adapted for, e.g., administration, for example, an injectable formulation that is, e.g., an aqueous or non-aqueous solution or suspension or a liquid drop designed to be administered into an ear canal. In some embodiments, a pharmaceutical composition may be formulated for administration via injection either in a particular organ or compartment, e.g., directly into an ear, or systemic, e.g., intravenously. In some embodiments, a formulation may be or comprise drenches (aqueous or non-aqueous solutions or suspensions), tablets, boluses, powders, granules, pastes, capsules, powders, etc. In some embodiments, an active agent may be or comprise an isolated, purified, or pure compound.

[0236] Polypeptide: As used herein refers to any polymeric chain of residues (e.g., amino acids) that are typically linked by peptide bonds. In some embodiments, a polypeptide has an amino acid sequence that occurs in nature. In some embodiments, a polypeptide has an amino acid sequence that does not occur in nature. In some embodiments, a polypeptide has an amino acid sequence that is engineered in that it is designed and/or produced through action of the hand of man. In some embodiments, a polypeptide may comprise or consist of natural amino acids, non-natural amino acids, or both. In some embodiments, a polypeptide may comprise or consist of only natural amino acids or only non-natural amino acids. In some embodiments, a polypeptide may comprise D-amino acids, L-amino acids, or both. In some embodiments, a polypeptide may comprise only D-amino acids. In some embodiments, a polypeptide may comprise only L-amino acids. In some embodiments, a polypeptide may include one or more pendant groups or other modifications, e.g., modifying or attached to one or more amino acid side chains, at the polypeptide's N-terminus, at the polypeptide's C-terminus, or any combination thereof. In some embodiments, such pendant groups or modifications may be selected from the group consisting of acetylation, amidation, lipidation, methylation, pegylation, etc., including combinations thereof. In some embodiments, a polypeptide may be cyclic, and/or may comprise a cyclic portion. In some embodiments, a polypeptide is not cyclic and/or does not comprise any cyclic portion. In some embodiments, a polypeptide is linear. In some embodiments, a polypeptide may be or comprise a stapled polypeptide. In some embodiments, the term “polypeptide” may be appended to a name of a reference polypeptide, activity, or structure; in such instances it is used herein to refer to polypeptides that share the relevant activity or structure and thus can be considered to be members of the same class or family of polypeptides. For each such class, the present specification provides and/or those skilled in the art will be aware of exemplary polypeptides within the class whose amino acid sequences and/or functions are known; in some embodiments, such exemplary polypeptides are reference polypeptides for the polypeptide class or family. In some embodiments, a member of a polypeptide class or family shows significant sequence homology or identity with, shares a common sequence motif (e.g., a characteristic sequence element) with, and/or shares a common activity (in some embodiments at a comparable level or within a designated range) with a reference polypeptide of the class; in some embodiments with all polypeptides within the class). For example, in some embodiments, a member polypeptide shows an overall degree of sequence homology or identity with a reference polypeptide that is at least about 30-40%, and is often greater than about 50%, 60%, 70%, 80%, 90%, 91%, 92%, 93%, 94%, 95%, 96%, 97%, 98%, 99% or more and/or includes at least one region (e.g., a conserved region that may in some embodiments be or comprise a characteristic sequence element) that shows very high sequence identity, often greater than 90% or even 95%, 96%, 97%, 98%, or 99%. Such a conserved region usually encompasses at least 3-4 and often up to 20 or more amino acids; in some embodiments, a conserved region encompasses at least one stretch of at least 2, 3, 4, 5, 6, 7, 8, 9, 10, 11, 12, 13, 14, 15 or more contiguous amino acids. In some embodiments, a useful polypeptide may comprise or consist of a fragment of a parent polypeptide. In some embodiments, a useful polypeptide as may comprise or consist of a plurality of fragments, each of which is found in the same parent polypeptide in a different spatial arrangement relative to one another than is found in the polypeptide of interest (e.g., fragments that are directly linked in the parent may be spatially separated in the polypeptide of interest or vice versa, and/or fragments may be present in a different order in the polypeptide of interest than in the parent), so that the polypeptide of interest is a derivative of its parent polypeptide. In some embodiments, a polypeptide may be a protein.

[0237] Pro Component: As used herein, the term “pro component” refers to an inactive component. In some embodiments, a pro component once expressed can take an active form, for example, to have an intended effect. In some embodiments, a pro component may be expressed in vitro. In some embodiments, a pro component may be expressed in vivo. In some embodiments, a pro component may be expressed in a tissue (e.g., of an animal (e.g., a mammal)).

[0238] Protein: As used herein, the term “protein” refers to a polypeptide (i.e., a string of at least two amino acids linked to one another by peptide bonds). Proteins may include moieties other than amino acids (e.g., may be glycoproteins, proteoglycans, etc.) and/or may be otherwise processed or modified. Those of ordinary skill in the art will appreciate that a “protein” can be a complete polypeptide chain as produced by a cell (with or without a signal sequence), or can be a characteristic portion thereof. Those of ordinary skill will appreciate that a protein can sometimes include more than one polypeptide chain, for example linked by one or more disulfide bonds or associated by other means. Polypeptides may contain l-amino acids, d-amino acids, or both and may contain any of a variety of amino acid modifications or analogs known in the art. Useful modifications include, e.g., terminal acetylation, amidation, methylation, etc. In some embodiments, proteins may comprise natural amino acids, non-natural amino acids, synthetic amino acids, and combinations thereof. In some embodiments, proteins are antibodies, antibody fragments, biologically active portions thereof, and/or characteristic portions thereof.

[0239] Reference: As used herein describes a standard or control relative to which a comparison is performed. For example, in some embodiments, an agent, animal, individual, population, sample, sequence or value of interest is compared with a reference or control agent, animal, individual, population, sample, sequence or value. In some embodiments, a reference or control is tested and/or determined substantially simultaneously with the testing or determination of interest. In some embodiments, a reference or control is a historical reference or control, optionally embodied in a tangible medium. Typically, as would be understood by those skilled in the art, a reference or control is determined or characterized under comparable conditions or circumstances to those under assessment. Those skilled in the art will appreciate when sufficient similarities are present to justify reliance on and/or comparison to a particular possible reference or control.

[0240] Regulatory Element: As used herein, the term “regulatory element” or “regulatory sequence” refers to non-coding regions of DNA that regulate, in some way, expression of one or more particular genes. In some embodiments, such genes are apposed or “in the neighborhood” of a given regulatory element. In some embodiments, such genes are located quite far from a given regulatory element. In some embodiments, a regulatory element impairs or enhances transcription of one or more genes. In some embodiments, a regulatory element may be located in cis to a gene being regulated. In some embodiments, a regulatory element may be located in trans to a gene being regulated. For example, in some embodiments, a regulatory sequence refers to a nucleic acid sequence which is regulates expression of a gene product operably linked to a regulatory sequence. In some such embodiments, this sequence may be an enhancer sequence and other regulatory elements which regulate expression of a gene product.

[0241] Sample: As used herein, the term “sample” typically refers to an aliquot of material obtained or derived from a source of interest. In some embodiments, as would be appreciated from the context by a person of ordinary skill in the art, the term “sample” may be used interchangeably with terms like “mixture”, or “complex mixture”, or “complex sample”. In some embodiments, a source of interest is a biological or environmental source. In some embodiments, a source of interest may be or comprise a cell or an organism, such as a microbe, a plant, or an animal (e.g., a human). In some embodiments, a source of interest is or comprises biological tissue or fluid. In some embodiments, a biological tissue or fluid may be or comprise cells, serum, extracellular matrix, CSF, and/or combinations or component(s) thereof. In some embodiments, a biological tissue or fluid may be or comprise amniotic fluid, aqueous humor, ascites, bile, bone marrow, blood, breast milk, cerebrospinal fluid, cerumen, chyle, chime, ejaculate, endolymph, exudate, feces, gastric acid, gastric juice, lymph, mucus, pericardial fluid, perilymph, peritoneal fluid, pleural fluid, pus, rheum, saliva, sebum, semen, serum, smegma, sputum, synovial fluid, sweat, tears, urine, vaginal secretions, vitreous humour, vomit, and/or combinations or component(s) thereof. In some embodiments, a biological fluid may be or comprise an intracellular fluid, an extracellular fluid, an intravascular fluid (blood plasma), an interstitial fluid, a lymphatic fluid, and/or a transcellular fluid. In some embodiments, a biological fluid may be or comprise a plant exudate. In some embodiments, a biological tissue or sample may be obtained, for example, by aspirate, biopsy (e.g., fine needle or tissue biopsy), swab (e.g., oral, nasal, skin, or vaginal swab), scraping, surgery, washing or lavage (e.g., brocheoalvealar, ductal, nasal, ocular, oral, uterine, vaginal, or other washing or lavage). In some embodiments, a biological sample is or comprises cells obtained from an individual. In some embodiments, a sample is a “primary sample” obtained directly from a source of interest by any appropriate means. In some embodiments, as will be clear from context, the term “sample” refers to a preparation that is obtained by processing (e.g., by removing one or more components of and/or by adding one or more agents to) a primary sample. For example, filtering using a semi-permeable membrane. Such a “processed sample” may comprise, for example nucleic acids or proteins extracted from a sample or obtained by subjecting a primary sample to one or more techniques such as amplification or reverse transcription of nucleic acid, isolation and/or purification of certain components, etc.

[0242] Specific: The term “specific”, when used herein with reference to an agent having an activity, is understood by those skilled in the art to mean that the agent discriminates between potential target entities or states. For example, in some embodiments, an agent is said to bind “specifically” to its target if it binds preferentially with that target in the presence of one or more competing alternative targets. In many embodiments, specific interaction is dependent upon the presence of a particular structural feature of the target entity (e.g., an epitope, a cleft, a binding site). It is to be understood that specificity need not be absolute. In some embodiments, specificity may be evaluated relative to that of the binding agent for one or more other potential target entities (e.g., competitors). In some embodiments, specificity is evaluated relative to that of a reference specific binding agent. In some embodiments specificity is evaluated relative to that of a reference non-specific binding agent. In some embodiments, the agent or entity does not detectably bind to the competing alternative target under conditions of binding to its target entity. In some embodiments, binding agent binds with higher on-rate, lower off-rate, increased affinity, decreased dissociation, and/or increased stability to its target entity as compared with the competing alternative target(s).

[0243] Subject: As used herein, the term “subject” refers to an organism, typically a mammal (e.g., a human, in some embodiments including prenatal human forms). In some embodiments, a subject is suffering from a relevant disease, disorder or condition. In some embodiments, a subject is susceptible to a disease, disorder, or condition. In some embodiments, a subject displays one or more symptoms or characteristics of a disease, disorder or condition. In some embodiments, a subject does not display any symptom or characteristic of a disease, disorder, or condition. In some embodiments, a subject is someone with one or more features characteristic of susceptibility to or risk of a disease, disorder, or condition. In some embodiments, a subject is a patient. In some embodiments, a subject is an individual to whom diagnosis and/or therapy is and/or has been administered.

[0244] Substantially: As used herein, the term “substantially” refers to the qualitative condition of exhibiting total or near-total extent or degree of a characteristic or property of interest. One of ordinary skill in the biological arts will understand that biological and chemical phenomena rarely, if ever, go to completion and/or proceed to completeness or achieve or avoid an absolute result. The term “substantially” is therefore used herein to capture the potential lack of completeness inherent in many biological and chemical phenomena.

[0245] Therapeutic agent: As used herein, the phrase “therapeutic agent” in general refers to any agent that elicits a desired pharmacological effect when administered to an organism. In some embodiments, an agent is considered to be a therapeutic agent if it demonstrates a statistically significant effect across an appropriate population. In some embodiments, the appropriate population may be a population of model organisms. In some embodiments, an appropriate population may be defined by various criteria, such as a certain age group, gender, genetic background, preexisting clinical conditions, etc. In some embodiments, a therapeutic agent is a substance that can be used to alleviate, ameliorate, relieve, inhibit, prevent, delay onset of, reduce severity of, and/or reduce incidence of one or more symptoms or features of a disease, disorder, and/or condition. In some embodiments, a “therapeutic agent” is an agent that has been or is required to be approved by a government agency before it can be marketed for administration to humans. In some embodiments, a “therapeutic agent” is an agent for which a medical prescription is required for administration to humans. In some embodiments, a therapeutic agent is a therapeutic protein.

[0246] Variant: As used herein, the term “variant” refers to a version of something, e.g., a gene sequence, that is different, in some way, from another version. To determine if something is a variant, a reference version is typically chosen and a variant is different relative to that reference version. In some embodiments, a variant can have the same or a different (e.g., increased or decreased) level of activity or functionality than a wild type sequence. For example, in some embodiments, a variant can have improved functionality as compared to a wild-type sequence if it is, e.g., mutated to confer reduced toxicity in a cell. As another example, in some embodiments, a variant can have improved functionality as compared to a wild-type sequence if it is, e.g., mutated to confer improved protein production in a cell. As another example, a “variant polypeptide” as used herein is a variant polypeptide that comprises one or more mutations relative to a reference polypeptide.

### DETAILED DESCRIPTION

### I. Barcoded Cargos

[0247] Methods and systems to generate and use barcodes and barcoded cargo are described herein. In some embodiments, a cargo polypeptide is encoded by a cargo component. In some embodiments, a peptide barcode is encoded by a barcode component. In some embodiments, cargo components are operably linked to barcode components. Other exemplary cargos are described throughout the present disclosure.

[0248] Among other things, the present disclosure provides for methods used to detect and/or characterize cargos. In some embodiments, methods disclosed herein are used to detect and/or characterize cargo polypeptides (e.g., therapeutic polypeptides) encoded by cargo components. In some embodiments, methods disclosed herein are used to detect and/or characterize therapeutic or non-therapeutic polypeptides. In some embodiments, methods disclosed herein are used to detect and/or characterize cargos by tagging them with barcodes (e.g., barcoded cargo components). In some embodiments, methods disclosed herein are used to detect and/or characterize cargos in vitro. In some embodiments, methods disclosed herein are used to detect and/or characterize cargos in vivo. In some embodiments, methods disclosed herein are used to detect and/or characterize a cargo. In some embodiments, methods disclosed herein are used to detect and/or characterize multiple (e.g., two or more, three or more, four or more, etc.) cargos.

i. Barcodes

[0249] In some embodiments, a barcode is or comprises an amino acid sequence. In some embodiments, a barcode is or comprises an amino acid sequence that occurs in nature. In some embodiments, a barcode is or comprises an amino acid sequence that does not occur in nature. In some embodiments, a barcode is or comprises an amino acid sequence that is synthetic. In some embodiments, a barcode comprises naturally occurring amino acids. In some embodiments, a barcode comprises non-naturally occurring amino acids (e.g., modified amino acids). In some embodiments, a barcode is or comprises a peptide barcode.

[0250] Barcodes of the present disclosure can be of varying lengths. For example, in some embodiments, a barcode may have a length ranging between 1 and 100 amino acids. In some embodiments, a barcode may have a length ranging between 5 and 50 amino acids. In some embodiments, a barcode may have a length ranging between 8 and 25 amino acids. In some embodiments, a barcode may have a length ranging between 9 and 25 amino acids. In some embodiments, a barcode may have a length ranging between 9 and 15 amino acids. In some embodiments, a barcode may have a length of 1, 2, 3, 4, 5, 6, 7, 8, 9, 10, 11, 12, 13, 14, 15, 16, 17, 18, 19, 20, 21, 22, 23, 24, or 25 amino acids. In some embodiments, a barcode may have a length of at least 5 amino acids. In some embodiments, a barcode may have a length of at most 100 amino acids.

[0251] Barcodes, as described herein may be available in a library in different formats. For example, in some embodiments a barcode as described herein may be described as a nucleic acid sequence. In other instance, a barcode as described herein may be described as an amino acid sequence. A person of ordinary skill in the art will appreciate that barcodes described in one format may be converted to another format using basic biological principles. Accordingly, barcodes described as nucleic acid sequences may be translated into proteins, which may be used to detect the presence or absence of a cargo (e.g., cargo polypeptide) in a mixture. Such a translated barcode is referred to herein as a peptide barcode.

[0252] Accordingly, barcodes of the present disclosure when described using nucleic acids may have lengths different from amino acid sequence lengths disclosed in the paragraph above. For example, in some embodiments, a barcode may have a length ranging between 3 and 300 nucleotides. In some embodiments, a barcode may have a length ranging between 15 and 150 nucleotides. In some embodiments, a barcode may have a length ranging between 24 and 75 nucleotides. In some embodiments, a barcode may have a length ranging between 27 and 75 nucleotides. In some embodiments, a barcode may have a length ranging between 27 and 45 nucleotides. In some embodiments, a barcode may have a length of 3, 4, 5, 6, 7, 8, 9, 10, 11, 12, 13, 14, 15, 16, 17, 18, 19, 20, 21, 22, 23, 24, 25, 26, 27, 28, 29, 30, 31, 32, 33, 34, 35, 36, 37, 38, 39, 40, 41, 42, 43, 44, 45, 46, 47, 48, 49, 50, 51, 52, 53, 54, 55, 56, 57, 58, 59, 60, 61, 62, 63, 64, 65, 66, 67, 68, 69, 70, 71, 72, 73, 74, or 75 nucleotides. In some embodiments, a barcode may have a length of at least 15 nucleotides. In some embodiments, a barcode may have a length of at most 300 nucleotides.

[0253] Barcodes of the present disclosure may have one or more properties. In some embodiments, a barcode may be naturally occurring. In some embodiments, a barcode may not be naturally occurring (e.g., synthetic). In some embodiments, a barcode may have relatively no effect on cargo function. For example, in some embodiments, tagging a cargo (e.g., a cargo component) with a barcode as described herein does not alter or change relatively the function of the tagged cargo. In some embodiments, a barcode may have an effect (e.g., positive or negative) on cargo function. For example, in some embodiments, tagging a cargo (e.g., a cargo component) with a barcode as described herein may alter or change relatively a function (e.g., half-life (e.g., longer half-life), enhance targeting to specific tissue, etc.) of the tagged cargo. In some embodiments, a barcode may not elicit an immune response (e.g., an IgG response, a complement response, etc.). In some embodiments, barcodes are orthogonal to each other. In some embodiments, barcodes are not orthogonal to each other.

[0254] Barcodes of the present disclosure may be associated to various positions of a cargo. For example, in some embodiments, a barcode may be associated (e.g., covalently or non-covalently) to a suitable (e.g., desirable) position on a cargo. In some embodiments, a barcode may be associated (e.g., covalently or non-covalently) to a less-suitable or non-suitable (e.g., non-desirable) position on a cargo. In some embodiments, a peptide barcode may be associated (e.g., covalently or non-covalently) to a suitable position on a cargo polypeptide. For example, in some embodiments, a barcode may be associated (e.g., covalently or non-covalently) to an N-terminus of a cargo polypeptide. In some embodiments, a barcode may be associated (e.g., covalently or non-covalently) to a C-terminus of a cargo polypeptide. In some embodiments, a barcode may be associated (e.g., covalently or non-covalently) to a non-terminal position on a cargo polypeptide (e.g., side chain). In some embodiments, a barcode may be associated (e.g., covalently or non-covalently) to a less-suitable or non-suitable (e.g., non-desirable) position on a cargo polypeptide.

[0255] Among other things, barcodes (e.g., peptide barcodes or barcode components encoding peptide barcodes) of the present disclosure may be flanked by additional sequences (e.g., nucleic acid sequences, amino acid sequences, etc.). In some embodiments, a barcode may be flanked by additional sequences on a barcode's 5′ end. In some embodiments, a barcode may be flanked by additional sequences on a barcode's 3′ end. In some embodiments, a barcode may be flanked by additional sequences on a barcode's 3′ and 5′ end. In some embodiments, an additional sequence may be a primer binding site, a protease-cleavable linker sequence, a sortase site, a transglutaminase site, a restriction endonuclease recognition sequence, a restriction enzyme site (e.g., a cleavage site), a sequence that encodes an amino acid sequence, a sequence that does not encode an amino acid sequence, an amino acid sequence, or a nucleic acid sequence. For example, in some embodiments, a barcode may be flanked by nucleic acid sequences encoding an amino acid sequence. In some embodiments, a barcode may be flanked by nucleic acid sequences that does not encode an amino acid sequence. In some embodiments, a barcode may be flanked by amino acid sequences. In some embodiments, a peptide barcode may be flanked by amino acid sequences (e.g., Glycine-Serine (GS), e.g., other linker amino acid sequences). Analogously, in some embodiments, a barcode component encoding a peptide barcode of the present disclosure may be flanked by additional sequences (e.g., nucleic acid sequences, amino acid sequences, etc.). In some embodiments, a barcode component encoding a peptide barcode may be flanked by nucleic acid sequences on a 5′ end. In some embodiments, a barcode component encoding a peptide barcode may be flanked by nucleic acid sequences on a 3′ end. In some embodiments, a barcode component encoding a peptide barcode may be flanked by nucleic acid sequences on a 3′ and 5′ end. In some embodiments, a barcode component encoding a peptide barcode may be flanked by nucleic acid sequences encoding an amino acid sequence comprising a Glycine-Serine (GS). In some embodiments, a barcode component encoding a peptide barcode may be flanked by nucleic acid sequences encoding an amino acid sequence comprising a linker amino acid sequence as described herein.

[0256] In some embodiments, a barcode may be flanked by restriction endonuclease recognition sequences. In some embodiments, a barcode may be flanked by restriction endonuclease recognition sequences on a barcode's 5′ end. In some embodiments, a barcode may be flanked by restriction endonuclease recognition sequences on a barcode's 3′ end. In some embodiments, barcode may be flanked by restriction endonuclease recognition sequences on a barcode's 3′ and 5′ end. In some embodiments, a nucleic acid encoding a peptide barcode may be flanked by restriction endonuclease recognition sequences. In some embodiments, a nucleic acid encoding a peptide barcode may be flanked by restriction endonuclease recognition sequences on a 5′ end. In some embodiments, a nucleic acid encoding a peptide barcode may be flanked by restriction endonuclease recognition sequences on a 3′ end. In some embodiments, a nucleic acid encoding a peptide barcode may be flanked by restriction endonuclease recognition sequences on a 3′ and 5′ end. In some embodiments, a restriction endonuclease recognition sequence may be recognized by one or more restriction enzymes (e.g., BsaI, BsmBI, BbsI, SapI, etc.). In some embodiments, restriction endonuclease recognition sequences are Type I, Type II, or Type IIs restriction endonuclease recognition sequences. Such recognition sequences, for example, may be used to produce universal overhangs that may be used in cloning peptide barcodes into different locations of various cargo. Such flexibility allows a barcode to be used to detect different cargo polypeptides in different experiments.

[0257] In some embodiments, a barcode component encoding a barcode (e.g., a peptide barcode) may be associated with (e.g., attached to, linked to) a second cargo component encoding a cargo polypeptide (e.g., a cargo polypeptide of interest). Such nucleic acid sequences, for example, may be translated to form barcoded cargos (e.g., barcoded cargo polypeptides, barcoded shuttle-cargo polypeptides). In some embodiments, a barcode component encoding a barcode (e.g., a peptide barcode) is separate from a cargo component encoding a cargo polypeptide (e.g., a cargo polypeptide of interest). For such nucleic acid sequences, for example, a barcode component encoding a peptide barcode may be translated separately from a cargo component sequence encoding a cargo polypeptide, and subsequently attached using one or more methods known in the art to join distinct amino acid sequences (e.g., using linkers).

[0258] Barcodes of the present disclosure may be associated (e.g., directly or indirectly attached) to cargos so as to form barcoded cargos (or barcoded cargo components as described herein). For example, in some embodiments, each barcode sequence (e.g., peptide barcode sequence) may be associated to only one cargo of interest (e.g., cargo polypeptide of interest) within a mixture. In some embodiments, each barcode sequence may be associated to more than one cargo of interest (e.g., cargos with different sequences) within a mixture. In some embodiments, multiple (e.g., two or more, three or more, four or more, etc.) barcode sequences may be associated to one cargo of interest within a mixture. For example, in some embodiments, one or more barcode sequences may be associated to various different positions on a given cargo—such a setup may be useful in, for example, in studying and identifying the stability and/or cleavage of such barcoded cargos. In some embodiments, each cargo in a mixture is a unique sequence (e.g., each cargo has a different sequence from every other cargo in the mixture). In some embodiments, each cargo in a mixture is a non-unique sequence.

[0259] Various methods and parameters may be used to select suitable barcodes for a given cargo. For example, stability of a barcoded cargo is key in determining if a cargo may be tagged by said barcode. In some embodiments, a barcode may be tagged to a specific cargo across different experiments. In some embodiments, a barcode may be tagged to different cargos in different experiments. For example, in some embodiments, a barcode may be tagged to two or more, three or more, four or more, ten or more, 100 or more, 1000 or more, or 10,000 or more different cargos across different experiments.

[0260] In some embodiments, a barcode may be associated with only one cargo in a given experiment. In some embodiments, a barcode may be associated with multiple cargos in a given experiment. For example, in some embodiments, one or more barcodes are associated with multiple cargos (i.e., a barcode is tagged to multiple cargos) in a mixture, such that each cargo is associated with a unique set of barcodes within the mixture. That is, each cargo may be associated with a unique “pattern” of barcodes in the mixture. Analogously, in some embodiments, several cargos may be associated with the same barcode.

[0261] Among other things, barcodes described herein are designed to have a distinct (i.e., unique) sequence. In some embodiments, a barcode is designed to have a distinct sequence (e.g., distinct from another barcode). For example, each barcode is designed to be distinct (e.g., unique) from every other barcode used in an experiment, such that each cargo (e.g., protein to be measured) is attached to at least one barcode, and each barcode (e.g., barcode with a specific sequence) is only attached to one cargo. As may be understood by a person of ordinary skill in the art, the diversity of barcodes contained within a pool is limited only by the possible diversity of amino acid sequences for a given barcode length. For example, for a barcode length ‘N’, there exists 20^{N} distinct amino acid barcode sequences of length N (if only unmodified/naturally occurring amino acids are used). That is, for a barcode length of 15, the theoretical limit is 20¹⁵, or 3.2768×10¹⁹.

[0262] In some embodiments, barcodes, as described herein, can be designed and/or developed through machine-learning methods.

[0263] Example of barcodes according to various embodiments of the present disclosure are listed in Table 1 and Table 2. In some embodiments, a barcode (e.g., peptide barcode) is or comprises an amino acid sequence selected from SEQ ID NOs: 5347-8398. In some embodiments, a barcode (e.g., peptide barcode) is encoded by a sequence that is or comprises a nucleic acid sequence selected from SEQ ID NOs: 1148-4199.

ii. Cargo Polypeptides

[0264] Methods and systems disclosed herein may be used for detection of one or more cargos as described herein.

[0265] In one aspect, systems and methods disclosed herein may be used for detecting a cargo (e.g., cargo polypeptide) in a mixture. Specifically, barcodes disclosed herein tagged to a cargo (e.g., barcoded cargo component) in a mixture and used to detect said cargo in the mixture. In some embodiments, each cargo is different from every other cargo in a mixture. In some embodiments, each cargo in a mixture is different from every other cargo in a mixture by at least one amino acid. In some embodiments, each cargo in a mixture is different from every other cargo in a mixture by two or more amino acids. In some embodiments, a cargo (e.g., in a mixture) may be tagged with a barcode. In some embodiments, each cargo (e.g., in a mixture) may be tagged with a same barcode. In some embodiments, each cargo (e.g., in a mixture) may be tagged with different barcode. In some embodiments, a cargo (e.g., in a mixture) may be tagged with a barcode that is different from every other barcode (e.g., associated with other cargos) in a mixture by at least one amino acid. In some embodiments, a cargo (e.g., in a mixture) may be tagged with a barcode that is different from every other barcode (e.g., associated with other cargos) in a mixture by two or more amino acids.

[0266] As discussed elsewhere in the specification, a cargo may be tagged with different barcodes (e.g., in different mixtures, different experiments, etc.). For example, as noted above, in some embodiments, each barcode sequence may be associated (e.g., covalently or non-covalently) with only one cargo of interest within a mixture. In some embodiments, each barcode sequence may be associated (e.g., covalently or non-covalently) with more than one cargo of interest (e.g., cargos with different sequences) within a mixture. In some embodiments, multiple (e.g., two or more, three or more, four or more, etc.) barcode sequences may be attached to one cargo of interest within a mixture. For example, in some embodiments, one or more barcode sequences may be attached to various different positions on a given cargo—such a setup may be useful in, for example, in studying and identifying the stability of such barcoded cargos. In some embodiments, each cargo in a mixture is a unique sequence (e.g., each cargo has a different sequence from every other cargo in the mixture). In some embodiments, each cargo in a mixture is a non-unique sequence.

[0267] In some embodiments, a cargo may be tagged to a specific barcode across different experiments. In some embodiments, a cargo may be tagged to different barcodes in different experiments. For example, in some embodiments, a cargo may be tagged to two or more, three or more, four or more, ten or more, 100 or more, 1000 or more, or 10,000 or more different barcodes across different experiments.

[0268] In some embodiments, a cargo may be associated with only one barcode in a given experiment. In some embodiments, a cargo may be associated with multiple barcodes in a given experiment. For example, in some embodiments, one or more barcodes (e.g., in a mixture) are associated with multiple cargos (i.e., a barcode is tagged to multiple cargos) in a mixture, such that each cargo is associated with a unique set of barcodes within the mixture. That is, each cargo may be associated with a unique “pattern” of barcodes in the mixture. In some embodiments, several cargos may be associated with the same barcode.

[0269] Among other things, the present disclosure provides for nucleic acids comprising, for example, a cargo component encoding a cargo polypeptide of interest. In some embodiments, a cargo polypeptide has a therapeutic function. In some embodiments, a cargo polypeptide does not have a therapeutic function (e.g., may aid another cargo with a therapeutic function). For example, possible cargo polypeptides which one may wish to screen as drugs, such as monoclonal antibodies, single domain antibodies, enzymes, bispecific antibodies, or any other cargo polypeptide which may have therapeutic function.

[0270] In some embodiments, a cargo polypeptide further comprises a targeting moiety. In some embodiments, a targeting moiety targets a cargo polypeptide to a location of interest (e.g., a cell of interest, a tissue of interest, an organ of interest). In some embodiments, a targeting moiety targets a cargo polypeptide to a cell-receptor agent of interest. In some embodiments, a cell-receptor agent targeted by the targeting moiety is referred to herein as a “portal”. In some embodiments, a targeting moiety is expressed on a surface of a delivery particle described herein. Targeting moieties are known in the art.

[0271] In some embodiments, a cargo polypeptide further comprises a localizing moiety. In some embodiments, a localizing moiety is a secretion peptide signal. In some embodiments, a localizing moiety is a nuclear localization signal. Other localizing moieties are known in the art.

[0272] In some embodiments, a cargo polypeptide further comprises a pro component. In some embodiments, a pro component, as described herein, refers to an inactive component that, once expressed in a tissue of interest, takes an active form so that it exhibits an intended effect. For example, pro components include moieties such as carboxylic, hydroxyl, amine, or phosphate/phosphonate groups. In some embodiments, pro components may be activated once exposed to environmental conditions such as pH, presence (or absence) of an agent, etc.

[0273] In some embodiments, a cargo polypeptide further comprises a tag moiety. In some embodiments, a tag moiety comprises a detectable moiety. Tag moieties are known in the art.

[0274] In some embodiments, a cargo polypeptide further comprises a liganding moiety. In some embodiments, a liganding moiety targets a cargo polypeptide to a tissue of interest. In some embodiments, a liganding moiety targets a cargo polypeptide to a target agent within a cell, tissue, or organ (e.g., in vivo). In some embodiments, a liganding moiety targets a cargo polypeptide to a target agent on a surface of a cell, tissue, or organ (e.g., in vivo). In some embodiments, a cargo polypeptide further comprises a stability modifying moiety. In some embodiments, a cargo polypeptide further comprises a masking moiety. In some embodiments, a cargo polypeptide further comprises an allosteric modulation moiety.

[0275] In some embodiments, a liganding moiety is or comprises a targeting moiety. In some embodiments, a targeting moiety is or comprises a liganding moiety.

[0276] In some embodiments, a targeting moiety, as described herein, can be designed and/or developed through machine-learning methods. In some embodiments, a liganding moiety, as described herein, can be designed and/or developed through machine-learning methods.

[0277] In some embodiments, a cargo is or comprises a therapeutic agent. In some embodiments, a therapeutic agent is or comprises a nucleic acid. In some embodiments, a therapeutic agent is or comprises a polysaccharide. In some embodiments, a therapeutic agent is or comprises a small molecule. In some embodiments, a therapeutic agent is or comprises a peptide or polypeptide. In some embodiments, a cargo is or comprises an antibody. In some embodiments, a cargo is or comprises an antibody associated with a targeting moiety, as described herein. In some embodiments, a cargo is or comprises an antibody associated with a liganding moiety, as described herein. In some embodiments, a cargo is or comprises an antibody drug conjugate (ADC). In some embodiments, a cargo is or comprises an ADC associated with a targeting moiety, as described herein. In some embodiments, a cargo is or comprises an ADC associated with a liganding moiety, as described herein.

[0278] Examples of cargos according to various embodiments of the present disclosure are listed in Table 3 and Table 4. In some embodiments, a cargo is or comprises an antibody. In some embodiments, a cargo is or comprises one or more variable light (VL) chains, variable heavy (VH) chains, and/or complementarity-determining regions (CDRs) of an antibody. In some embodiments, a cargo is or comprises an anti-CD20 antibody (i.e., anti-CD20 Abs). In some embodiments, a cargo is or comprises an anti-amyloid Beta (Aβ) antibody (i.e., anti-Aβ Abs, anti-Aβ oligomers, anti-Ab Abs or anti-Ab oligomers). In some embodiments, a cargo is or comprises an aBACE-1 antibody (i.e., aBACE-1 or anti-BACE-1 (i.e., an antibody that targets BACE-1)).

[0279] In some embodiments, a cargo is or comprises one or more sequences (e.g., VL, VH, CDR sequences) associated with an antibody. In some embodiments, a cargo is or comprises one or more sequences (e.g., VL, VH, CDR sequences) associated with rituximab, ocrelizumab, ofatumumab, ublituximab, obinutuzumab, aducanumab, lecanemab, gantenerumab, donanemab, prasinezumab, trontinemab, anti-BACE-1 antibody 6266, anti-BACE-1 antibody YW412.8.31, Lu AF82422, or MEDI1341.

[0280] In some embodiments, a cargo is operably linked to a shuttle. In some embodiments, a cargo component is operably linked to a nucleic acid referred to herein as a “shuttle component”. In some embodiments, a shuttle component is or comprises a nucleic acid sequence that encodes a peptide shuttle. In some embodiments, a peptide shuttle is linked (e.g., covalently and/or non-covalently) to a cargo polypeptide (e.g., to form a shuttle-cargo polypeptide). In some embodiments, a cargo polypeptide may not be associated with a shuttle (e.g., a peptide shuttle). Examples of shuttle-cargo polypeptides according to various embodiments of the present disclosure are listed in Table 5.

[0281] In some embodiments, a cargo polypeptide is or comprises a wild-type (e.g., naturally occurring) polypeptide. In some embodiments, a cargo polypeptide is or comprises a variant polypeptide (e.g., a variant cargo polypeptide). In some embodiments, a variant polypeptide is a variant of a reference polypeptide, which reference polypeptide is or comprises a wild-type (e.g., naturally occurring) polypeptide. In some embodiments, a variant polypeptide is or comprises at least one mutation relative to a reference polypeptide (e.g., a wild-type polypeptide).

Lengthy table referenced here
US20260158147A1-20260611-T00001
Please refer to the end of the specification for access instructions.

Lengthy table referenced here
US20260158147A1-20260611-T00002
Please refer to the end of the specification for access instructions.

Lengthy table referenced here
US20260158147A1-20260611-T00003
Please refer to the end of the specification for access instructions.

[0282] In some embodiments, a variant cargo polypeptide is associated with (e.g., operably linked to) a barcode, as described herein (i.e., a barcoded variant cargo polypeptide). In some embodiments, a variant cargo polypeptide possesses improved functionality (e.g., reduced toxicity (e.g., reduced anemia), improved pharmacokinetic measures (e.g., dissociation constant (Kd), improved biophysical properties, etc.) relative to a reference polypeptide (e.g., a wild-type polypeptide).

[0283] In some embodiments, cargos, as described herein, can be designed and/or developed through machine-learning methods. In some embodiments, cargo polypeptides, as described herein, can be designed and/or developed through machine-learning methods. For example, in some embodiments, a cargo polypeptide (e.g., comprising a targeting moiety or a liganding moiety as described herein) can be designed and/or developed (e.g., may be refined through multiple iterations) through machine-learning methods.

[0284] An assessment of pharmacokinetic (PK) properties is a key criteria in the nomination of therapeutic leads, but typically occurs in the later stages of drug discovery and only for a limited number of candidates. The binder-barcode platform described herein allows to characterize PK of many therapeutic candidates earlier in drug discovery.

[0285] In some embodiments, cargos, designed and/or developed through machine-learning methods possess improved functionality (e.g, reduced toxicity (e.g., reduced anemia), improved pharmacokinetic (PK) measures (e.g., dissociation constant (Kd), improved biophysical properties, epitope properties, affinity properties, thermostability properties, pH sensitivity properties, etc.) relative to a reference cargo (e.g., a wild-type cargo). In some embodiments, cargo polypeptides, designed and/or developed through machine-learning methods possess improved functionality (e.g, reduced toxicity (e.g., reduced anemia), improved pharmacokinetic (PK) measures (e.g., dissociation constant (Kd), improved biophysical properties, epitope properties, affinity properties, thermostability properties, pH sensitivity properties, etc.) relative to a reference cargo polypeptide (e.g., a wild-type cargo polypeptide). In some embodiments, shuttle-cargo polypeptides, designed and/or developed through machine-learning methods possess improved functionality (e.g, reduced toxicity (e.g., reduced anemia), improved pharmacokinetic (PK) measures (e.g., dissociation constant (Kd), improved biophysical properties, epitope properties, affinity properties, thermostability properties, pH sensitivity properties, etc.) relative to a reference shuttle-cargo polypeptide (e.g., a wild-type shuttle-cargo polypeptide).

iii. Cargo Oligonucleotides

[0286] In some embodiments, a cargo is or comprises a nucleic acid. In some embodiments, a cargo is or comprises an oligonucleotide. In some embodiments, a cargo is or comprises an antibody associated with (e.g., covalently, non-covalently) an oligonucleotide. In some embodiments, a cargo is or comprises an antibody associated with an oligonucleotide that is associated with a targeting moiety, as described herein. In some embodiments, a cargo is or comprises an antibody associated with an oligonucleotide that is associated with a liganding moiety, as described herein.

[0287] In some embodiments, an oligonucleotide comprises DNA. In some embodiments, an oligonucleotide comprises RNA. In some embodiments, an oligonucleotide comprises DNA and RNA. In some embodiments, an oligonucleotide comprises or is an RNA interference (RNAi) molecule. In some embodiments a cargo is or comprises an RNAi targeting an RNA. In some embodiments, a cargo is or comprises an RNAi targeting a non-coding RNA (ncRNA). In some embodiments a cargo is or comprises an RNAi targeting a long non-coding RNA (lncRNA) In some embodiments, a cargo is or comprises an RNAi targeting a coding RNA (cRNA or mRNA). In some embodiments, an RNAi molecule is or comprises an antisense oligonucleotide (ASO). In some embodiments, an RNAi molecule is or comprises an shRNA. In some embodiments, an RNAi molecule is or comprises an miRNA. In some embodiments, an oligonucleotide comprises or is a gRNA. In some embodiments, an oligonucleotide comprises or is an siRNA. In some embodiments, an oligonucleotide comprises or is a DNA interference (DNAi) molecule.

iv. Linkers

[0288] Among other things, systems and methods described herein may use linkers. In some embodiments, a cargo as described herein and a barcode as described herein are separated by a linker. In some embodiments, linkers (L) provide distance between a cargo (P) and a barcode (b). That is, structurally a barcoded cargo, in some embodiments, may have a sequence of P-L-b. This, for example, may contribute to folding characteristics, cargo functionality, and/or cargo stability.

[0289] In some embodiments, linkers may be nucleic acids. In some embodiments, linkers may be amino acids. Linkers as described herein may have varying lengths. For example, in some embodiments, a linker may have a length of at least 3 amino acids. In some embodiments, a linker may have a length of between 1 and 50 amino acids (e.g., between 1 and 30 amino acids). In some embodiments, for example, a linker is or comprises a sequence GGGS (SEQ ID NO: 9059).

[0290] In some embodiments, linkers of the present invention may be cleaved upon treatment. For example, in some embodiments, a linker may comprise one or more motifs that may be cleaved upon treatment.

[0291] In some embodiments, linkers of the present invention may be resistant to cleavage. In some embodiments, linkers of the present invention may be resistant to cleavage in assays. In some embodiments, linkers of the present invention may be resistant to cleavage in vivo.

[0292] In one aspect, linkers may be used to tag barcodes. In some embodiments, each linker sequence is associated with a distinct barcode sequence. For example, in some embodiments, a linker sequence may be used as a unique tag associated with a distinct barcode sequence (e.g., nucleic acid sequence) in a mixture. That is, in some embodiments, such a linker may be used to amplify an associated barcode sequence. For example, in some embodiments, such a linker may be used as a primer to amplify an associated barcode sequence. Subsequently, in some embodiments, an amplified linker may be used to isolate an associated barcode sequence, allowing for retrieval of the barcode sequence (e.g., nucleic acid sequence) from a given linker-barcode pair. In some embodiments, a linker-barcode pair may be subject to DNA sequencing for identification of the barcode sequence.

[0293] In some embodiments, a nucleic acid sequence encoding for a linker-barcode pair may be used to associate (e.g., link) the linker-barcode pair to a new cargo.

### II. Binders and Binding Agents

i. Binders

[0294] In some embodiments, a binder (i.e., a binder moiety) is or comprises a nucleic acid sequence. In some embodiments, a binder is or comprises a nucleic acid sequence that occurs in nature. In some embodiments, a binder is or comprises a nucleic acid sequence that does not occur in nature. In some embodiments, a binder is or comprises a nucleic acid sequence that is synthetic. In some embodiments, a binder comprises naturally occurring nucleic acids. In some embodiments, a binder comprises non-naturally occurring nucleic acids (e.g., modified nucleic acids).

[0295] In some embodiments, a binder nucleic acid sequence is or comprises a sequence that encodes for a polypeptide sequence. For example, in some embodiments, a binder nucleic acid sequence may contain a region, which encodes for a polypeptide sequence conferring high affinity and/or specificity for a given barcode (e.g., peptide barcode). In some embodiments, a binder nucleic acid sequence is or comprises a sequence that encodes for an antibody. In some embodiments, a binder nucleic acid sequence is or comprises a sequence that encodes for a fragment of an antibody. In some embodiments, a binder nucleic acid sequence is or comprises a sequence that encodes for a single-chain variable Fragment (scFv). As maybe known to those of ordinary skill in the art, a scFv is a fusion protein of the variable regions of the heavy (V_{H}) and light chains (V_{L}) of immunoglobulins. In some embodiments, a V_{H} and V_{L} chain may be connected with a short linker peptide (e.g., linker of about 5-50 amino acids in length, 10-25 amino acids in length, etc.).

[0296] In some embodiments, for example, a binder is generated to have known specificity and affinity for a given barcode. In some embodiments, a binder is generated to have known specificity and affinity for one barcode. In some embodiments, a binder is generated to have known specificity and affinity for multiple (e.g., two or more, three or more, etc.) barcodes. In some embodiments, a binder is generated to have known specificity and affinity for at least one barcode. In some embodiments, a binder, for example, is expressed on the surface of a binding agent (e.g., a phage, a ribosome, etc.) using methods known to those skilled in the art.

[0297] In some embodiments, a binder associates with a barcode (e.g., with known specificity and affinity).

[0298] In some embodiments, a binder is or comprises a polypeptide sequence that occurs in nature. In some embodiments, a binder is or comprises a polypeptide sequence that does not occur in nature. In some embodiments, a binder is or comprises a polypeptide sequence that is synthetic. In some embodiments, a binder comprises naturally occurring amino acids. In some embodiments, a binder comprises non-naturally occurring amino acids (e.g., modified amino acids).

[0299] Binders of the present invention may be of varying lengths. For example, in some embodiments, a binder may have a length ranging between 5 to 1000 amino acids. In some embodiments, a binder may have a length ranging between 5 to 800 amino acids. In some embodiments, a binder may have a length ranging between 6 to 500 amino acids. In some embodiments, a binder may have a length ranging between 10 to 400 amino acids. In some embodiments, a binder may have a length ranging between 5 to 500 amino acids. In some embodiments, a binder may have a length ranging between 5 to 1000 amino acids. In some embodiments, a binder may have a length of 10 amino acids. In some embodiments, a binder may have a length of at least 5 amino acids. In some embodiments, a binder may have a length of at most 1000 amino acids.

[0300] Binders, as described herein may be available in a library in different formats. For example, in some embodiments a binder as described herein may be described as a nucleic acid sequence. In other instance, a binder as described herein may be described as an amino acid sequence. A person of ordinary skill in the art will appreciate that binders described in one format may be converted to another format using basic biological principles. Accordingly, binders described as nucleic acid sequences may be translated into proteins, which may be used to detect the presence or absence of a cargo (e.g., barcoded cargo (e.g., barcoded cargo polypeptide, barcoded shuttle-cargo polypeptide)) in a mixture. Such a translated binder is referred to herein as a polypeptide binder or polypeptide binder moiety.

[0301] Accordingly, binders of the present disclosure when described using nucleic acids may have lengths different from amino acid sequence lengths disclosed in the paragraph above. For example, in some embodiments, a binder may have a length ranging between 15 to 3000 nucleotides. In some embodiments, a binder may have a length ranging between 15 to 2400 nucleotides. In some embodiments, a binder may have a length ranging between 24 to 1500 nucleotides. In some embodiments, a binder may have a length ranging between 30 to 1200 nucleotides. In some embodiments, a binder may have a length of 30 nucleotides. In some embodiments, a binder may have a length of at least 15 nucleotides. In some embodiments, a binder may have a length of at most 3000 nucleotides.

[0302] Binders of the present disclosure may have one or more specific properties. In some embodiments, a binder may be naturally occurring. In some embodiments, a binder may not be naturally occurring (e.g., synthetic). In some embodiments, a binder may not elicit an immune response (e.g., an IgG response, a complement response, etc.).

[0303] Among other things, binders (e.g., polypeptide binders, nucleic acids encoding binders) of the present disclosure, like barcodes discussed above, may be flanked by additional sequences (e.g., nucleic acid sequences, amino acid sequences, etc.). In some embodiments, a binder may be flanked by additional sequences on a binder's 5′ end. In some embodiments, a binder may be flanked by additional sequences on a binder's 3′ end. In some embodiments, a binder may be flanked by additional sequences on a binder's 3′ and 5′ end. In some embodiments, an additional sequence may be a primer binding site, a protease-cleavable linker sequence, a sortase site, a transglutaminase site, a restriction endonuclease recognition sequence, a restriction enzyme site (e.g., a cleavage site), a sequence that encodes an amino acid sequence, a sequence that does not encode an amino acid sequence, an amino acid sequence, or a nucleic acid sequence.

[0304] In one aspect of the present invention, a binder nucleic acid sequence may be associated with (e.g., attached to, linked to) another nucleic acid sequence. For example, in some embodiments, a binder nucleic acid sequence may be associated with a nucleic acid sequence encoding one or more genes. In some embodiments, a binder nucleic acid sequence may be associated with a nucleic acid sequence encoding one or more genes of a phage (e.g., m13). In some embodiments, a binder nucleic acid sequence may be associated with a nucleic acid sequence encoding a polypeptide. In some embodiments, a binder nucleic acid sequence may be associated with a nucleic acid sequence encoding a polypeptide of a phage (e.g., m13 gene3 protein). The binder-gene3 protein fusion can be expressed and incorporated into m13 phage.

[0305] Among other things, binders described herein are designed to have a distinct (i.e., unique) sequence. In some embodiments, a binder is designed to have a distinct sequence (e.g., distinct from another binder). For example, each binder is designed to be distinct from every other binder used in an experiment (i.e., to be unique).

[0306] In some embodiments, binders, as described herein, can be designed and/or developed through machine-learning methods.

[0307] In one aspect of the present invention, binders bind to barcodes or barcoded cargos, as described herein, with high specificity and high affinity. In some embodiments, a barcode or barcoded cargo (e.g., barcoded cargo polypeptide to be measured, a barcoded shuttle-cargo polypeptide to be measured, a barcoded shuttle peptide to be measured) binds to one binder, and each binder (e.g., binder with a specific sequence) binds to one barcode or barcoded cargo. In some embodiments, a barcode or barcoded cargo (e.g., barcoded cargo polypeptide to be measured, a barcoded shuttle-cargo polypeptide to be measured, a barcoded shuttle peptide to be measured) binds to at least one binder. In some embodiments, each binder (e.g., binder with a specific sequence) binds to at least one barcode or barcoded cargo. In some embodiments, multiple binders (e.g., with different sequences (e.g., polypeptide sequences)) bind to a single barcode. In some embodiments, multiple barcodes (e.g., with different sequences (e.g., peptide sequences)) bind to a single binder.

[0308] Example of binders according to various embodiments of the present disclosure are listed in Table 1 and Table 2. In some embodiments, a binder (e.g., polypeptide binder) is or comprises an amino acid sequence selected from SEQ ID NOs: 4200-5346. In some embodiments, a binder (e.g., polypeptide binder) is encoded by a sequence that is or comprises a nucleic acid sequence selected from SEQ ID NOs: 1-1147.

iii. Binding Agents

[0309] Methods described herein relate to the detection of one or more barcodes using a binding agent. In some embodiments, a binding agent is associated with or comprises a detectable nucleic acid. In some embodiments, a binding agent expresses a detectable nucleic acid. In some embodiments, a binding agent expresses a detectable nucleic acid on its surface (e.g., a binder). In some embodiments, a binding agent expresses an antibody on its surface.

[0310] In some embodiments, for example, to detect the presence of a specific (e.g., distinct) barcode, the present invention envisions the association of a distinct detectable nucleic acid (e.g., a DNA sequence, an RNA sequence, etc.) to a specific barcode. This is achieved through contacting a barcode with a binding agent. In some embodiments, one or more barcodes may be contacted with a binding agent. In some embodiments, one or more binding agents may be contacted with a barcode.

[0311] In some embodiments, a binding agent may be or comprises a phage, a ribosome, mRNA, DNA etc. In some embodiments, a binding agent is a phage. In some embodiments, a binding agent is may be a M13 phage, T4 phage, T7 phage, Lambda phage, or filamentous phage. In some embodiments, a binding agent is may be a M13 phage.

[0312] Binders as disclosed herein may be expressed on binding agents using methods known in the art. For example, a person of ordinary skill in the art may be able to express a nucleic acid encoding a polypeptide binder on (e.g., on a surface) of a phage using techniques and methods available in the art.

### III. Shuttles

[0313] In some embodiments, a shuttle is or comprises a polypeptide sequence. In some embodiments, a shuttle is or comprises polypeptide sequence that occurs in nature. In some embodiments, a shuttle is or comprises a polypeptide sequence that does not occur in nature. In some embodiments, a shuttle is or comprises a polypeptide sequence that is synthetic. In some embodiments, a shuttle comprises naturally occurring amino acids. In some embodiments, a shuttle comprises non-naturally occurring amino acids (e.g., modified amino acids). In some embodiments, a shuttle is or comprises a peptide shuttle.

[0314] Shuttles of the present disclosure can be of varying lengths. For example, in some embodiments, a shuttle may have a length ranging between 1 and 500 amino acids. In some embodiments, a shuttle may have a length ranging between 1 and 400 amino acids. In some embodiments, a shuttle may have a length ranging between 1 and 300 amino acids. In some embodiments, a shuttle may have a length ranging between 1 and 200 amino acids. In some embodiments, a shuttle may have a length ranging between 5 and 200 amino acids. In some embodiments, a shuttle may have a length ranging between 20 and 200 amino acids. In some embodiments, a shuttle may have a length ranging between 50 and 200 amino acids. In some embodiments, a shuttle may have a length ranging between 20 and 175 amino acids. In some embodiments, a shuttle may have a length ranging between 20 and 150 amino acids. In some embodiments, a shuttle may have a length ranging between 100 and 150 amino acids. In some embodiments, a shuttle may have a length ranging between 100 and 130 amino acids. In some embodiments, a shuttle may have a length of 1, 2, 3, 4, 5, 6, 7, 8, 9, 10, 11, 12, 13, 14, 15, 16, 17, 18, 19, 20, 21, 22, 23, 24, 25, 50, 100, 105, 110, 115, 120, 125, 130, 135, 140, 145, or 150 amino acids. In some embodiments, a shuttle may have a length of at least 5 amino acids. In some embodiments, a shuttle may have a length of at most 150 amino acids.

[0315] Shuttles, as described herein may be available in different formats. For example, in some embodiments a shuttle as described herein may be described as a nucleic acid sequence. In other instances, a shuttle as described herein may be described as an amino acid sequence. A person of ordinary skill in the art will appreciate that shuttles described in one format may be converted to another format using basic biological principles. Accordingly, in some embodiments, shuttles described as nucleic acid sequences may be translated into proteins, which may be used to deliver a cargo (e.g., cargo polypeptide) to a cell, tissue, or organ of interest. In some embodiments, shuttles described as nucleic acid sequences may be translated into proteins, which may be used to transport a cargo (e.g., cargo polypeptide) to a cell, tissue, or organ of interest. In some embodiments, shuttles described as nucleic acid sequences may be translated into proteins, which may be used to “shuttle” (or “transport”) a cargo (e.g., cargo polypeptide) to a cell, tissue, or organ of interest. In some embodiments, shuttles described as nucleic acid sequences may be translated into proteins, which may be used to unidirectionally “shuttle” a cargo (e.g., cargo polypeptide) to a cell, tissue, or organ of interest. Such a translated shuttle, for example, may be referred to herein as a peptide shuttle or a shuttle.

[0316] In some embodiments, shuttles comprising a nucleic acid sequence may be used to deliver a cargo (e.g., cargo nucleic acid) to a cell, tissue, or organ of interest, without first undergoing translation. In some embodiments, shuttles comprising a nucleic acid sequence may be used to transport a cargo (e.g., cargo nucleic acid) to a cell, tissue, or organ of interest, without first undergoing translation. In some embodiments, shuttles comprising a nucleic acid sequence may be used to “shuttle” (or “transport”) a cargo (e.g., cargo nucleic acid) to a cell, tissue, or organ of interest, without first undergoing translation. In some embodiments, shuttles comprising a nucleic acid sequence may be used to unidirectionally “shuttle” a cargo (e.g., cargo nucleic acid) to a cell, tissue, or organ of interest, without first undergoing translation.

[0317] In some embodiments, a shuttle comprising an amino acid sequence may be used to deliver, transport, or shuttle a cargo that is of a different format from said shuttle (e.g., a heterologous cargo). That is, in some embodiments, a peptide shuttle comprising an amino acid sequence may be used to deliver, transport, or shuttle a cargo comprising a nucleic acid, a polysaccharide, a small molecule, or a combination thereof (i.e., a heterologous cargo). In some embodiments, a shuttle comprising an amino acid sequence may be used to deliver, transport, or shuttle a cargo (e.g., a cargo nucleic acid, a cargo polysaccharide, a cargo small molecule). In some embodiments, a shuttle comprising a nucleic acid sequence may be used to deliver, transport, or shuttle a cargo that is of a different format from said shuttle (e.g., a heterologous cargo). That is, in some embodiments, shuttle comprising a nucleic acid sequence may be used to deliver, transport, or shuttle a heterologous cargo (e.g., a cargo polypeptide, a cargo polysaccharide, a cargo small molecule).

[0318] Accordingly, shuttles of the present disclosure when described using nucleic acids may have lengths different from amino acid sequence lengths disclosed in the paragraph above. For example, in some embodiments, a shuttle may have a length ranging between 3 and 1500 nucleotides. In some embodiments, a shuttle may have a length ranging between 3 and 1200 nucleotides. In some embodiments, a shuttle may have a length ranging between 3 and 900 nucleotides. In some embodiments, a shuttle may have a length ranging between 3 and 600 nucleotides. In some embodiments, a shuttle may have a length ranging between 15 and 600 nucleotides. In some embodiments, a shuttle may have a length ranging between 60 and 600 nucleotides. In some embodiments, a shuttle may have a length ranging between 150 and 600 nucleotides. In some embodiments, a shuttle may have a length ranging between 60 and 525 nucleotides. In some embodiments, a shuttle may have a length ranging between 60 and 450 nucleotides. In some embodiments, a shuttle may have a length ranging between 300 and 450 nucleotides. In some embodiments, a shuttle may have a length ranging between 300 and 390 nucleotides. In some embodiments, a shuttle may have a length of 3, 4, 5, 6, 7, 8, 9, 10, 11, 12, 13, 14, 15, 16, 17, 18, 19, 20, 21, 22, 23, 24, 25, 26, 27, 28, 29, 30, 31, 32, 33, 34, 35, 36, 37, 38, 39, 40, 41, 42, 43, 44, 45, 46, 47, 48, 49, 50, 51, 52, 53, 54, 55, 56, 57, 58, 59, 60, 61, 62, 63, 64, 65, 66, 67, 68, 69, 70, 71, 72, 73, 74, 75, 150, 300, 315, 330, 345, 360, 375, 390, 405, 420, 435, or 450 nucleotides. In some embodiments, a shuttle may have a length of at least 15 nucleotides. In some embodiments, a shuttle may have a length of at most 450 nucleotides.

[0319] Shuttles of the present disclosure may have one or more properties. In some embodiments, a shuttle may be naturally occurring. In some embodiments, a shuttle may not be naturally occurring (e.g., synthetic). In some embodiments, a shuttle may have relatively no effect on cargo function. For example, in some embodiments, tagging a cargo (e.g., a cargo component) with a shuttle as described herein does not alter or change relatively the function of the tagged cargo. In some embodiments, a shuttle may have an effect (e.g., positive or negative) on cargo function. In some embodiments, a shuttle may comprise a structural feature (e.g., length, hydrophobicity, affinity, sequence motif, etc.) that has an effect (e.g., positive or negative) on cargo function. For example, in some embodiments, tagging a cargo (e.g., a cargo component) with a shuttle as described herein may alter or change relatively a function (e.g., half-life (e.g., longer half-life), toxicity (e.g., anemia), enhance targeting to specific tissue, etc.) of the tagged cargo. For example, in some embodiments, toxicity (e.g., anemia) may occur due to reticulocyte killing caused by sub-optimal shuttles (e.g., shuttle moieties). In some embodiments, a shuttle may not elicit an immune response (e.g., an IgG response, a complement response, etc.). In some embodiments, shuttles are orthogonal to each other. In some embodiments, shuttles are not orthogonal to each other. In some embodiments, shuttles (e.g., peptide shuttles) enhance targeting to a specific cell, tissue, or organ of interest. In some embodiments, shuttles (e.g., peptide shuttles) enhance targeting to a brain cell, brain tissue, or brain of an organism. In some embodiments, shuttles (e.g., peptide shuttles) do not enhance targeting to a specific cell, tissue, or organ of interest. In some embodiments, shuttles (e.g. peptide shuttles) enhance targeting across the blood brain barrier. In some embodiments, a shuttle (e.g., a shuttle moiety) is or comprises an antibody. In some embodiments, a shuttle (e.g., a shuttle moiety) is or comprises a variant or a fragment of an antibody. For example, in some embodiments, a shuttle as described herein is a VHH-based (i.e., nanobody-based) shuttle. In some embodiments, a shuttle as described herein is a Fabs-based shuttle. In some embodiments, a shuttle as described herein is scFv-based.

[0320] Shuttles of the present disclosure may be associated to various positions of a cargo. For example, in some embodiments, a shuttle (e.g., a shuttle moiety) may be associated (e.g., covalently or non-covalently) to a suitable (e.g., desirable) position on a cargo. In some embodiments, a shuttle may be associated (e.g., covalently or non-covalently) to a less suitable or non-suitable (e.g., non-desirable) position on a cargo. In some embodiments, a peptide shuttle may be associated (e.g., covalently or non-covalently) to a suitable position on a cargo. In some embodiments, a peptide shuttle may be associated (e.g., covalently or non-covalently) to a suitable position on a cargo polypeptide. For example, in some embodiments, a shuttle (e.g., a peptide shuttle) may be associated (e.g., covalently or non-covalently) to an N-terminus of a cargo polypeptide. In some embodiments, a shuttle (e.g., a peptide shuttle) may be associated (e.g., covalently or non-covalently) to a C-terminus of a cargo polypeptide. In some embodiments, a shuttle (e.g., a peptide shuttle) may be associated (e.g., covalently or non-covalently) to a non-terminal position on a cargo polypeptide (e.g., side chain). In some embodiments, a shuttle (e.g., a peptide shuttle) may be associated (e.g., covalently or non-covalently) to a less suitable or non-suitable (e.g., non-desirable) position on a cargo polypeptide.

[0321] Shuttles of the present disclosure may be associated to various positions of a therapeutic agent. For example, in some embodiments, a shuttle (e.g., a shuttle moiety) may be associated (e.g., covalently or non-covalently) to a suitable position on a therapeutic agent. In some embodiments, a shuttle may be associated (e.g., covalently or non-covalently) to a non-suitable (e.g., non-desirable) position on a therapeutic agent. In some embodiments, a peptide shuttle may be associated (e.g., covalently or non-covalently) to a suitable position on a therapeutic agent. In some embodiments, a peptide shuttle may be associated (e.g., covalently or non-covalently) to a suitable position on a therapeutic polypeptide. For example, in some embodiments, a shuttle (e.g., a peptide shuttle) may be associated (e.g., covalently or non-covalently) to an N-terminus of a therapeutic polypeptide. In some embodiments, a shuttle (e.g., a peptide shuttle) may be associated (e.g., covalently or non-covalently) to a C-terminus of a therapeutic polypeptide. In some embodiments, a shuttle (e.g., a peptide shuttle) may be associated (e.g., covalently or non-covalently) to a non-terminal position on a therapeutic polypeptide (e.g., side chain). In some embodiments, a shuttle (e.g., a peptide shuttle) may be associated (e.g., covalently or non-covalently) to a less suitable or non-suitable (e.g., non-desirable) position on a therapeutic polypeptide.

[0322] Among other things, shuttles (e.g., peptide shuttles or shuttle components encoding peptide shuttles) of the present disclosure may be flanked by additional sequences (e.g., nucleic acid sequences, amino acid sequences, etc.). In some embodiments, a shuttle may be flanked by additional sequences on a shuttle's 5′ end. In some embodiments, a shuttle may be flanked by additional sequences on a shuttle's 3′ end. In some embodiments, a shuttle may be flanked by additional sequences on a shuttle's 3′ and 5′ end. In some embodiments, an additional sequence may be a primer binding site, a protease-cleavable linker sequence, a sortase site, a transglutaminase site, a restriction endonuclease recognition sequence, a restriction enzyme site (e.g., a cleavage site), a sequence that encodes an amino acid sequence, a sequence that does not encode an amino acid sequence, an amino acid sequence, or a nucleic acid sequence. For example, in some embodiments, a shuttle may be flanked by nucleic acid sequences encoding an amino acid sequence. In some embodiments, a shuttle may be flanked by nucleic acid sequences that does not encode an amino acid sequence. In some embodiments, a shuttle may be flanked by amino acid sequences. In some embodiments, a peptide shuttle may be flanked by amino acid sequences (e.g., Glycine-Serine (GS), e.g., other linker amino acid sequences). Analogously, in some embodiments, a shuttle component encoding a peptide shuttle of the present disclosure may be flanked by additional sequences (e.g., nucleic acid sequences, amino acid sequences, etc.). In some embodiments, a shuttle component encoding a peptide shuttle may be flanked by nucleic acid sequences on a 5′ end. In some embodiments, a shuttle component encoding a peptide shuttle may be flanked by nucleic acid sequences on a 3′ end. In some embodiments, a shuttle component encoding a peptide shuttle may be flanked by nucleic acid sequences on a 3′ and 5′ end. In some embodiments, a shuttle component encoding a peptide shuttle may be flanked by nucleic acid sequences encoding an amino acid sequence comprising a Glycine-Serine (GS). In some embodiments, a shuttle component encoding a peptide shuttle may be flanked by nucleic acid sequences encoding an amino acid sequence comprising a linker amino acid sequence as described herein.

[0323] In some embodiments, a shuttle may be flanked by restriction endonuclease recognition sequences. In some embodiments, a shuttle may be flanked by restriction endonuclease recognition sequences on a shuttle's 5′ end. In some embodiments, a shuttle may be flanked by restriction endonuclease recognition sequences on a shuttle's 3′ end. In some embodiments, a shuttle may be flanked by restriction endonuclease recognition sequences on a shuttle's 3′ and 5′ end. In some embodiments, a nucleic acid encoding a peptide shuttle may be flanked by restriction endonuclease recognition sequences. In some embodiments, a nucleic acid encoding a peptide shuttle may be flanked by restriction endonuclease recognition sequences on a 5′ end. In some embodiments, a nucleic acid encoding a peptide shuttle may be flanked by restriction endonuclease recognition sequences on a 3′ end. In some embodiments, a nucleic acid encoding a peptide shuttle may be flanked by restriction endonuclease recognition sequences on a 3′ and 5′ end. In some embodiments, a restriction endonuclease recognition sequence may be recognized by one or more restriction enzymes (e.g., BsaI, BsmBI, BbsI, SapI, etc.). In some embodiments, restriction endonuclease recognition sequences are Type I, Type II, or Type IIs restriction endonuclease recognition sequences. Such recognition sequences, for example, may be used to produce universal overhangs that may be used in cloning peptide shuttles into different locations of various cargo. Such flexibility allows a shuttle to be used to detect different cargo polypeptides in different experiments.

[0324] In some embodiments, a shuttle (e.g., a peptide shuttle) is cleavable. In some embodiments, a shuttle may be cleaved using an enzyme. In some embodiments, a shuttle (e.g., a peptide shuttle) may be cleaved using a protease. In some embodiments, a shuttle (e.g., a peptide shuttle) is cleaved spontaneously. For example, in some embodiments, a shuttle (e.g., a peptide shuttle) is cleaved spontaneously in a specific cell, tissue, or organ of interest (e.g., a brain cell, tissue, or organ). In some embodiments, a shuttle (e.g., a peptide shuttle) is non-cleavable.

[0325] In some embodiments, a shuttle component encoding a shuttle (e.g., a peptide shuttle) may be associated with (e.g., attached to, linked to) a second cargo component encoding a cargo polypeptide (e.g., a cargo polypeptide of interest). Such nucleic acid sequences, for example, may be translated to form shuttle-cargos (e.g., shuttle-cargo polypeptides). In some embodiments, a shuttle component encoding a shuttle (e.g., a peptide shuttle) is separate from a cargo component encoding a cargo polypeptide (e.g., a cargo polypeptide of interest). For such nucleic acid sequences, for example, a shuttle component encoding a peptide shuttle may be translated separately from a cargo component sequence encoding a cargo polypeptide, and subsequently attached using one or more methods known in the art to join distinct amino acid sequences (e.g., using linkers).

[0326] Shuttles (e.g., shuttle moieties) of the present disclosure may be associated (e.g., directly or indirectly attached) to cargos so as to form shuttle-cargos (or shuttle-cargo components as described herein). For example, in some embodiments, each shuttle sequence (e.g., peptide shuttle sequence) may be associated to only one cargo of interest (e.g., cargo polypeptide of interest) within a mixture. In some embodiments, each shuttle sequence may be associated to more than one cargo of interest (e.g., cargos with different sequences) within a mixture. In some embodiments, multiple (e.g., two or more, three or more, four or more, etc.) shuttle sequences may be associated to one cargo of interest within a mixture. For example, in some embodiments, one or more shuttle sequences may be associated to various different positions on a given cargo—such a setup may be useful in, for example, in studying and identifying the stability and/or cleavage of such shuttle-cargos. In some embodiments, each cargo in a mixture is a unique sequence (e.g., each cargo has a different sequence from every other cargo in the mixture). In some embodiments, each cargo in a mixture is a non-unique sequence.

[0327] In some embodiments, a shuttle (e.g., a shuttle moiety), as described herein, can be designed and/or developed through machine-learning methods. In some embodiments, shuttles, designed and/or developed through machine-learning methods possess improved functionality (e.g., reduced toxicity (e.g., reduced anemia), improved pharmacokinetic (PK) measures (e.g., dissociation constant (Kd), improved biophysical properties, epitope properties, affinity properties, thermostability properties, pH sensitivity properties, etc.) relative to a reference shuttle (e.g., a standard shuttle).

[0328] Various methods and parameters may be used to select suitable shuttles for a given cargo. For example, stability of a shuttle-cargo is key in determining if a cargo may be tagged (e.g., associated (e.g., covalently or non-covalently)) by said shuttle. In some embodiments, a shuttle may be tagged to a specific cargo across different experiments. In some embodiments, a shuttle may be tagged to different cargos in different experiments. For example, in some embodiments, a shuttle may be tagged to two or more, three or more, four or more, ten or more, 100 or more, 1000 or more, or 10,000 or more different cargos across different experiments.

[0329] In some embodiments, a shuttle may be associated with only one cargo in a given experiment. In some embodiments, a shuttle may be associated with multiple cargos in a given experiment. For example, in some embodiments, one or more shuttles are associated with multiple cargos (i.e., a shuttle is tagged to multiple cargos) in a mixture, such that each cargo is associated with a unique set of shuttles within the mixture. That is, each cargo may be associated with a unique “pattern” of shuttles in the mixture. Analogously, in some embodiments, several cargos may be associated with the same shuttle.

[0330] Among other things, shuttles described herein are designed to have a distinct (i.e., unique) sequence. In some embodiments, a shuttle is designed to have a distinct sequence (e.g., distinct from another shuttle). For example, each shuttle is designed to be distinct (e.g., unique) from every other shuttle used in an experiment, such that each cargo (e.g., protein to be measured) is attached to at least one shuttle, and each shuttle (e.g., shuttle with a specific sequence) is only attached to one cargo. As may be understood by a person of ordinary skill in the art, the diversity of shuttles contained within a pool is limited only by the possible diversity of amino acid sequences for a given shuttle length. For example, for a shuttle length ‘N’, there exists 20^{N} distinct amino acid shuttle sequences of length N (if only unmodified/naturally occurring amino acids are used). That is, for a shuttle length of 100, the theoretical limit is 20¹⁰⁰, or 1.26762×10¹³⁰.

[0331] In some embodiments, shuttles, as described herein, can be designed and/or developed through machine-learning methods.

[0332] Example of shuttles according to various embodiments of the present disclosure are listed in Table 6 and Table 7. In some embodiments, a shuttle (e.g., peptide shuttle) is or comprises an amino acid sequence selected from SEQ ID NOs: 8813-8894. In some embodiments, a shuttle (e.g., peptide shuttle) is encoded by a sequence that is or comprises a nucleic acid sequence selected from SEQ ID NOs: 8753-8812. In some embodiments, a shuttle (e.g., a shuttle component) is or comprises a nucleic acid sequence selected from SEQ ID NOs: 8753-8812. In some embodiments, a shuttle (e.g., peptide shuttle) is or comprises an amino acid sequence having 80%, 85%, 90%, 91%, 92%, 93%, 94%, 95%, 96%, 97%, 98% or 99% identity to a sequence selected from SEQ ID NOs: 8813-8894. In some embodiments, a shuttle (e.g., peptide shuttle) is encoded by a sequence that is or comprises a nucleic acid sequence having 80%, 85%, 90%, 91%, 92%, 93%, 94%, 95%, 96%, 97%, 98% or 99% identity to a sequence selected from SEQ ID NOs: 8753-8812. In some embodiments, a shuttle (e.g., a shuttle component) is or comprises a nucleic acid sequence having 80%, 85%, 90%, 91%, 92%, 93%, 94%, 95%, 96%, 97%, 98% or 99% identity to a sequence selected from SEQ ID NOs: 8753-8812.

TABLE 6
Table providing exemplary list of shuttle nucleic acid sequences

| SEQ ID NO. | ID | NUCLEIC ACID SEQUENCE |
|---|---|---|
| (SEQ ID NO. | TfR-1409 | CAGGTGCAACTGGTCGAGTCCGGCGGAGGCGTCGTGCAACCTG |
| 8753) | | GCAGGAGCCTCAGACTCTCCTGTGCTGCTAGCGGCTTTTCTTT |
| | | TAGCAATTTCGGAATGAGCTGGGTACGACAGGCACGCGGAAAA |
| | | GGATTGGAGTGGGTTTCCTCAACTGGATCTGACGGCACTGCGT |
| | | ACTATGCTGACTCCGTGAAAGGAAGGTTCACTATTTCTAGGGA |
| | | TAACGCGAAGAATACACTTTATTTGCAGATGAACTCTCTGCGA |
| | | GCTGAGGACACCGCGGTGTACTACTGCGCCAGAGCCCCAAGTA |
| | | GACACGGGTTCGACTACTGGGGCCAAGGAACCCIGGTTACAGT |
| | | CAGCAGC |
| (SEQ ID NO. | TfR-1409- | CAGGTGCAACTGGTCGAGTCCGGCGGAGGCGTCGTGCAACCTG |
| 8754) | 51 | GCAGGAGCCTCAGACTCTCCTGTGCTGCTAGCGGCTTCAGCTT |
| | | CAGCAATTTCGGCATGAGCTGGGTGCGTCAGGCCCGAGGGAAA |
| | | GGCTTGGAATGGGTCAGTTCCATCGGGAGCGACGGACGAGCTT |
| | | ACTACGCTGACAGCGTGAAGGGTCGGTTTACTATCAGCAGAGA |
| | | TAACGCCAAGAACACTCTGTACCTGCAAATGAATTCTCTGAGG |
| | | GCAGAGGATACTGCCGTGTACTATTGTGCCAGGGCGCCTTCAA |
| | | GGCACGGATTTGACTACTGGGGCCAAGGAACCCTGGTTACAGT |
| | | CAGCAGC |
| (SEQ ID NO. | TfR-1409-6 | CAGGTGCAACTGGTCGAGTCCGGCGGAGGCGTCGTGCAACCTG |
| 8755) | | GCAGGAGCCTCAGACTCTCCTGTGCTGCTAGCGGCTTCAGCTT |
| | | CAGCAATTTCGGCATGAGCTGGGTGCGTCAGGCCCGAGGGAAA |
| | | GGCTTGGAATGGGTCAGTTCCGTAGGGAGCGACGGAACCGCTT |
| | | ACTACGCTGACAGCGTGAAGGGTCGGTTTACTATCAGCAGAGA |
| | | TAACGCCAAGAACACTCTGTACCTGCAAATGAATTCTCTGAGG |
| | | GCAGAGGATACTGCCGTGTACTATTGTGCCAGGGCGCCTTCAA |
| | | GGCACGGATTTGACTACTGGGGCCAAGGAACCCTGGTTACAGT |
| | | CAGCAGC |
| (SEQ ID NO. | TfR-1409- | CAGGTGCAACTGGTCGAGTCCGGCGGAGGCGTCGTGCAACCTG |
| 8756) | 25 | GCAGGAGCCTCAGACTCTCCTGTGCTGCTAGCGGCTTCAGCTT |
| | | CAGCAATTTCGGCATGAGCTGGGTGCGTCAGGCCCCCGGGAAA |
| | | GGCTTGGAATGGGTCAGTTCCACCGGGAGCGACGGAACCGCTT |
| | | ACTACGCTGACAGCGTGAAGGGTCGGTTTACTATCAGCAGAGA |
| | | TAACGCCAAGAACACTCTGCACCTGCAAATGAATTCTCTGAGG |
| | | GCAGAGGATACTGCCGTGTACTATTGTGCCAGGGCGCCTTCAA |
| | | GGCACGGATTTGACTACTGGGGCCAAGGAACCCTGGTTACAGT |
| | | CAGCAGC |
| (SEQ ID NO. | TfR-455 | CAGGTGCAACTGGTCGAGTCCGGCGGAGGCGTCGTGCAACCTG |
| 8757) | | GCAGGAGCCTCAGACTCTCCTGTGCTGCTAGCGGCTTCGCTGT |
| | | CGATGCTAGCGATATGGGCTGGTTCCGCCAAGCCCCAGGCAAA |
| | | GGACGAGAACTGGTCTCATCTATCTCCAGCGATAACGACACCT |
| | | ATTACGCAGACAGCGTGGAGGGACGCTTCACCATTAGTCGTGA |
| | | CAATGCTAAGCGGATGGTCTACCTGCAGATGAATTCACTGAGG |
| | | GCTGAAGATACAGCTGTGTACTACTGCGCTAGCGGTAGATTTC |
| | | TGGAGCCTGATTACTGGGGCCAAGGAACCCTGGTTACAGTCAG |
| | | CAGC |
| (SEQ ID NO. | TfR-299 | CAGGTGCAACTGGTCGAGTCCGGCGGAGGCGTCGTGCAACCTG |
| 8758) | | GCAGGAGCCTCAGACTCTCCTGTGCTGCTAGCGGCTTCACCTT |
| | | TGACGACTCAGACATGGGTTGGTTTAGGCAGGCTCCTGGTAAA |
| | | GGCCGGGAGCTGGTCGCTGCTATCAACACAGGAGGAGGAAAGA |
| | | CCTACTATGCTGCAACAGTCGAAGGACGGTTTACAATATCCAG |
| | | GGATAACGCCAAGCGCATGGTGTATTTGCAGATGAACTCCCTT |
| | | AGAGCTGAGGACACCGCAGTATACTATTGCGCCTCAGGGCGAT |
| | | TTTTAGAACCCGACTACTGGGGCCAAGGAACCCTGGTTACAGT |
| | | CAGCAGC |
| (SEQ ID NO. | TfR-891 | CAGGTGCAACTGGTCGAGTCCGGCGGAGGCGTCGTGCAACCTG |
| 8759) | | GCAGGAGCCTCAGACTCTCCTGTGCTGCTAGCGGCCTGACATT |
| | | CGATGATAGCGATATGGGGTGGTTTCGCCAGGCTCCTGGTAAA |
| | | GAGCGTGAAAGAGTATCCACTATATCTAGTGACGGTACCCCAC |
| | | ACTATGATGACTCAGTCAAAGGCCGCTTTACCATTAGCAGAGA |
| | | CAATAGCAAAAATACTCTGTACCTTCAGATGAATTCACTTCGA |
| | | GCGGAAGACACTGCCGTGTACTACTGTGCAAGACGCGATGGTG |
| | | GCAGCTGGAATTTCGACTATTGGGGCCAAGGAACCCTGGTTAC |
| | | AGTCAGCAGC |
| (SEQ ID NO. | TfR-732 | CAGGTGCAACTGGTCGAGTCCGGCGGAGGCGTCGTGCAACCTG |
| 8760) | | GCAGGAGCCTCAGACTCTCCTGTGCTGCTAGCGGCTTTACCTT |
| | | CGATGGATCCGACATTGCATGGGTCAGGAGAGCCCCAGGAAAA |
| | | GGAGAGGAGTGGGTGAGTACCATCAGTTCAGACGGCACTGTGT |
| | | ACTACAGTGACCCTGTGAAGGGAAGATTTACAATCTCTGCTGA |
| | | TACATCAAAGAACACTGCATATCTGCAAATGAACAGTCTTAGG |
| | | GCAGAAGACACCGCAGTGTACTACTGTGCCATCAGCTCTTGGT |
| | | ACGGCGACTTCGACTACTGGGGCCAAGGAACCCTGGTTACAGT |
| | | CAGCAGC |
| (SEQ ID NO. | TfR-734 | CAGGTGCAACTGGTCGAGTCCGGCGGAGGCGTCGTGCAACCTG |
| 8761) | | GCAGGAGCCTCAGACTCTCCTGTGCTGCTAGCGGCCATATTCT |
| | | GAATTATTGGTATATGGGTTGGGTAAGACGTGCTCCCGGAAAA |
| | | GGAGAAGAGTGGGTCGCIGGCATATCCCCGGGGGGGACCGTCA |
| | | CGGTCTATGCCGACTCAGTGAAGGGAAGGTTCACTATAAGCAG |
| | | AGATAATTCCAAGAACACTCTGTACCTCCAGATGAACTCACTG |
| | | AGGGCAGAGGATACGGCTGTGTACTACTGTGCTAGAGGCGGCC |
| | | AGGGTGGTGACGCTTGGGCCTTCGACTATTGGGGCCAAGGAAC |
| | | CCTGGTTACAGTCAGCAGC |
| (SEQ ID NO. | TfR-358 | CAGGTGCAACTGGTCGAGTCCGGCGGAGGCGTCGTGCAACCTG |
| 8762) | | GCAGGAGCCTCAGACTCTCCTGTGCTGCTAGCGGCTTCGGCGT |
| | | GGCCTCAAGCGACATGGGTTGGTTCAGGCAGGCCCCTGGAAAG |
| | | GGAAGGGAGCTGGTGGCCAGTATTAATACTGACGGGTCAACGA |
| | | TCTACGCGGAGTCTGTGGAGGGCAGGTTCACCATCTCAAGAGA |
| | | CAACGCCAAGAGGATGGTCTACCTCCAGATGAACTCTTTGCGG |
| | | GCCGAAGATACTGCTGTGTATTACTGCGCCGCATACGATACCA |
| | | GCGCATACCACTCTCCTTTCGACTACTGGGGCCAAGGAACCCT |
| | | GGTTACAGTCAGCAGC |
| (SEQ ID NO. | TfR-85 | CAGGTGCAACTGGTCGAGTCCGGCGGAGGCGTCGTGCAACCTG |
| 8763) | | GCAGGAGCCTCAGACTCTCCTGTGCTGCTAGCGGCTACACCTT |
| | | CCGCTCAGCCAGTATGGGGTGGGTTCGGAGGGCCCCTGGCAAG |
| | | GGTGAGGAGTGGGTGGCCGTGATAGACAGTGAGGGACATACTA |
| | | TCTACGCTGACTCTGTAAAAGGGCGGTTTACTATAAGCGCCGA |
| | | TACCTCAAAAAATACTGCATATCTCCAGATGAACTCCCTCAGA |
| | | GCCGAGGATACTGCCGTGTATTATTGTGCGAAGGATATTTATG |
| | | GTGACTATGGCGGTCCCGACTATTGGGGCCAAGGAACCCTGGT |
| | | TACAGTCAGCAGC |
| (SEQ ID NO. | TfR-448 | CAGGTGCAACTGGTCGAGTCCGGCGGAGGCGTCGTGCAACCTG |
| 8764) | | GCAGGAGCCTCAGACTCTCCTGTGCTGCTAGCGGCACCCGACG |
| | | TCCTAACTACGTTACATGGTTCAGACAAGCTCCACTGAACGAG |
| | | CGACAAGTCGTCGCCGGCATTGACAGCGCCGGCACCACTACGT |
| | | ACGCCGATTCTGTCAAGGGCAGGTTCACTATCAGCCAGGATAA |
| | | CGCGAAAAACACTGTATATCTGCAGATGAACAGTCTGCGTGCG |
| | | GAGGATACAGCCGTTTACTACTGTGCTTCAGGAATTTCTTCCT |
| | | CATCCTTCTATCCATTCGACTCTTGGGGCCAAGGAACCCTGGT |
| | | TACAGTCAGCAGC |
| (SEQ ID NO. | TfR-1573 | CAGGTGCAACTGGTCGAGTCCGGCGGAGGCGTCGTGCAACCTG |
| 8765) | | GCAGGAGCCTCAGACTCTCCTGTGCTGCTAGCGGCTTTAACTT |
| | | TGACGACAGTGACATGGGGTGGTTTCGCCAAGCGCCAGGGAAA |
| | | GGTAGAGAGTTGGTCTCCTCAATCGCATCTGACGGGGCGACAT |
| | | ATTACGCGGACTCCGTGGAGGGCCGGTTTACCATCTCCCGGGA |
| | | TAATGCAAAGAGGATGGTGTACCTGCAAATGAATTCCCTCCGA |
| | | GCTGAAGATACAGCTGTCTACTACTGTGCTCGAGATAGTCCGT |
| | | CATTGCGAGCCTTTGACTCCTGGGGCCAAGGAACCCTGGTTAC |
| | | AGTCAGCAGC |
| (SEQ ID NO. | TfR-1417 | CAGGTGCAACTGGTCGAGTCCGGCGGAGGCGTCGTGCAACCTG |
| 8766) | | GCAGGAGCCTCAGACTCTCCTGTGCTGCTAGCGGCACCACCTA |
| | | TTCTCGCCAATACTGTATGGGATGGGCGAGGCAGGCCCCAGGT |
| | | AAGGGCCTGGAATGGGTCAGCTGTATTGACGACGATGGGAATA |
| | | CCTATTACGCCGATAGCGTTAAGGGTAGATTTACTATCAGCAG |
| | | AGATAATAGTAAGAACACACTCTATCTCCAGATGAATTCTCTG |
| | | CGCGCCGAAGATACTGCAGTGTACTACTGTGCTAGAGACCCTG |
| | | GCCTCAGCGGAGACTTTGATTATTGGGGCCAAGGAACCCTGGT |
| | | TACAGTCAGCAGC |
| (SEQ ID NO. | TfR-1090 | CAGGTGCAACTGGTCGAGTCCGGCGGAGGCGTCGTGCAACCTG |
| 8767) | | GCAGGAGCCTCAGACTCTCCTGTGCTGCTAGCGGCATTACCTA |
| | | CCGGGGGCCATGCATGGGGTGGTATCGCCAGGCGCCCGGGAAA |
| | | GGGCTTGAGTGGGTTGCGACTCTCGACTCTGACGGGAGCACCA |
| | | CTTATGCGGATTCTGTGAAAGGACGGTTTACGATCTCTAGGGA |
| | | TAACAGCAAAAATACACTGTATCTGCAGATGAATAGCCTCCGC |
| | | GCAGAGGATACTGCGGTGTATTACTGCGCAATGTATATGACAG |
| | | GCGGAGGGGGTGTAGCATTTGATTACTGGGGCCAAGGAACCCT |
| | | GGTTACAGTCAGCAGC |
| (SEQ ID NO. | TfR-1415 | CAGGTGCAACTGGTCGAGTCCGGCGGAGGCGTCGTGCAACCTG |
| 8768) | | GCAGGAGCCTCAGACTCTCCTGTGCTGCTAGCGGCTTTACCTT |
| | | CTCCAAATACGCTATGAACTGGGCCAGACAAGCGCCGGGCAAG |
| | | GGCCTCGAGTGGGTAGCGTTTATCGATACGGCCGGCAGGACCA |
| | | TCTATGCCGATTCAGTGAAAGGCAGATTTACCATTTCCCGGGA |
| | | TAACTCAAAGAATACCTTGTACCTTCAAATGAATTCTCTGAGA |
| | | GCTGAAGATACCGCCGTCTATTATTGCGCCCCTAGCTACGGCG |
| | | ATTCCGGAGATTACTTCGACTATTGGGGCCAAGGAACCCTGGT |
| | | TACAGTCAGCAGC |
| (SEQ ID NO. | CD98-11 | CAGGTGCAACTGGTCGAGTCCGGCGGAGGCGTCGTGCAACCTG |
| 8769) | | GCAGGAGCCTCAGACTCTCCTGTGCTGCTAGCGGCTTCCCTTT |
| | | TTCTAGCTACGGAATGGGATGGTTCCGTCAGGCTCCAGGCAAG |
| | | GAGCGAGAGGGTGTTGCAGGAGTGAATACGGGGGGAAGAACAT |
| | | CCTATGCAGAGTCCGTAAAGGGGCGATTCACCATCTCCCGGGA |
| | | CAATACACGCAACACACTTTACTTACAGATGAATAGCCTTCGT |
| | | GCCGAAGATACCGCCGTGTATTACTGTGCTAGAATACGGGCGG |
| | | CCGGCACAGTGGCGCCCTACTTCGACTACTGGGGCCAAGGAAC |
| | | CCTGGTTACAGTCAGCAGC |
| (SEQ ID NO. | CD98-74 | CAGGTGCAACTGGTCGAGTCCGGCGGAGGCGTCGTGCAACCTG |
| 8770) | | GCAGGAGCCTCAGACTCTCCTGTGCTGCTAGCGGCTACGTCGC |
| | | TGGTTACGTGGGATGGTACAGGCAGGCTCCAGGTAAGGATAGG |
| | | GAGGGCGTAGCTGCTATCGCCAGTGATGGGATGACAGCCTACG |
| | | CCCATAGTGTAAAAGGCAGGTTCACCATCTCCAGAGATAATAG |
| | | CAAAAACACTCTGTACCTTCAGATGAATTCTCTCAGGGCTGAA |
| | | GATACTGCTGTGTATTACTGTGCGTCCGGTTACTGCTCAGGGT |
| | | CAGGCTGCTACTTCGACAGTTGGGGCCAAGGAACCCTGGTTAC |
| | | AGTCAGCAGC |
| (SEQ ID NO. | CD98-82 | CAGGTGCAACTGGTCGAGTCCGGCGGAGGCGTCGTGCAACCTG |
| 8771) | | GCAGGAGCCTCAGACTCTCCTGTGCTGCTAGCGGCTTCCGATA |
| | | TAATAGCTACGCCATGGCCTGGGCACGTCAGGCTCCAGGCAAG |
| | | GGACTTGAGTGGGTTGCAGCCATCGCCGGGGACGGAAGAACAG |
| | | ATTATGCAGACTCCGTAAAGGGGCGATTCACCATCTCCCGGGA |
| | | CAATAGTAAAAACACACTTTACTTACAGATGAATAGCCTTCGT |
| | | GCCGAAGATACCGCCGTGTATTACTGTGCTAGAGAGGATACGG |
| | | CCGCCTTCGACTACTGGGGCCAAGGAACCCTGGTTACAGTCAG |
| | | CAGC |
| (SEQ ID NO. | CD98-87 | CAGGTGCAACTGGTCGAGTCCGGCGGAGGCGTCGTGCAACCTG |
| 8772) | | GCAGGAGCCTCAGACTCTCCTGTGCTGCTAGCGGCTACCGATC |
| | | TAATGGGTACTACATGGGATGGTTCCGTCAGGCTAGTGGCAAG |
| | | GAGCGAGAGGGTGTTGCAGTGATCGATAGCGGGGGAAGTACAT |
| | | CCTATGCAGACTCCGTAAAGGGGCGATTCACCATCTCCCTCGA |
| | | CAATGCCAAAAACACACTTTACTTACAGATGAATAGCCTTCGT |
| | | GCCGAAGATACCGCCGTGTATTACTGTGCTAGAGGGGTAAAGC |
| | | GGTATGGAGACGGGGGCACAGACCTCTACTATTACTTCGACTA |
| | | TTGGGGCCAAGGAACCCTGGTTACAGTCAGCAGC |
| (SEQ ID NO. | CD98-96 | CAGGTGCAACTGGTCGAGTCCGGCGGAGGCGTCGTGCAACCTG |
| 8773) | | GCAGGAGCCTCAGACTCTCCTGTGCTGCTAGCGGCTACACCTT |
| | | ACCTATGAGCACCGCATGGGCGAGGCAAGCACCTGGAAAAGGG |
| | | CTAGAATGGGTTGCTGCAATCGCCTCCGACGGGAGAACAGACT |
| | | ATGCTGACTCAGTCAAGGGGAGGTTTACCATTTCGCGAGATAA |
| | | CTCCAAGAATACAGTGTATCTGCAAATGAATTCACTGCGCGCT |
| | | GAAGATACTGCCGTCTACTATTGCGCCACTCTGTGGTGGTACG |
| | | GCGGCAGAACGTTCGACAGTTGGGGCCAAGGAACCCTGGTTAC |
| | | AGTCAGCAGC |
| (SEQ ID NO. | CD98-39 | CAGGTGCAACTGGTCGAGTCCGGCGGAGGCGTCGTGCAACCTG |
| 8774) | | GCAGGAGCCTCAGACTCTCCTGTGCTGCTAGCGGCTTCACCTT |
| | | TGATGACTTCGACATGGGATGGTACCGTCAGGCTCCAGGCAAG |
| | | GACCGAGAGGGTGTTGCAGTGATCCGGAGCGACGGAATCCTGG |
| | | CCTATAGTGACTCCGTAAAGGGGCGATTCACCATCTCCCGGGA |
| | | CAATAGTAAAAACACAGTCTACTTACAGATGAATAGCCTTCGT |
| | | GCCGAAGATACCGCCGTGTATTACTGTGCTAGAAGCCGGAGCA |
| | | ACTATAGTAGCGACGCCTACGCCTACTACTGGTTCGACGTGTG |
| | | GGGCCAAGGAACCCTGGTTACAGTCAGCAGC |
| (SEQ ID NO. | CD98-47 | CAGGTGCAACTGGTCGAGTCCGGCGGAGGCGTCGTGCAACCTG |
| 8775) | | GCAGGAGCCTCAGACTCTCCTGTGCTGCTAGCGGCGGATTTGA |
| | | TGATGCAGACGCCGAGTGGGGGTGGGCTAGGCAAGCACCTGGG |
| | | AAGGGCCTCGAATGGGTGGCCGCCATCGCGGGGGACGGAAGAA |
| | | CCGATTACGCCGGCTCAGTGAAGGGCCGGTTTACCATTTCCAG |
| | | GGATAACTCTAAGAACACTGTGTATCTTCAAATGAACTCCTTA |
| | | CGGGCTGAAGACACCGCAGTCTACTATTGTGCCAAGAATGGGC |
| | | AGTCAGGATTCAGCTTCGACCCCTGGGGCCAAGGAACCCTGGT |
| | | TACAGTCAGCAGC |
| (SEQ ID NO. | CD98-53 | CAGGTGCAACTGGTCGAGTCCGGCGGAGGCGTCGTGCAACCTG |
| 8776) | | GCAGGAGCCTCAGACTCTCCTGTGCTGCTAGCGGCTACACCTT |
| | | ACCTATGAGCACCGCATGGGCGAGGCAAGCACCTGGAAAAGGG |
| | | CTAGAATGGGTTGCTGCAATCGCCTCCGACGGGAGAACAGACT |
| | | ATGCTGACTCAGTCAAGGGGAGGITTACCATTTCGCGAGATAA |
| | | CTCCAAGAATACAGTGTATCTGCAAATGAATTCACTGCGCGCT |
| | | GAAGATACTGCCGTCTACTATTGCGCCTCTCTGAGCCGGGGGA |
| | | CCTATAGTAGCGGGTGGAAGTGGGACGACTATTGGGGCCAAGG |
| | | AACCCTGGTTACAGTCAGCAGC |
| (SEQ ID NO. | CD98-62 | CAGGTGCAACTGGTCGAGTCCGGCGGAGGCGTCGTGCAACCTG |
| 8777) | | GCAGGAGCCTCAGACTCTCCTGTGCTGCTAGCGGCTTCACCTT |
| | | TTCTAGCTACGCCATGTCATGGTTCCGTCAGGCTCTGGGCAAG |
| | | GACCGAGAGGGTGTTGCAGCCATCGATAGCGACGGAACAACAT |
| | | CCTATGGAGAGTCCGTAAAGGGGCGATTCACCATCTCCCGGGA |
| | | CAATAGTAAAAACACAGTCTACTTACAGATGAATAGCCTTCGT |
| | | GCCGAAGATACCGCCGTGTATTACTGTGCTAGAGCGTGGGGGG |
| | | TAGGCGACGACTACTACAGAATGGACTACTGGGGCCAAGGAAC |
| | | CCTGGTTACAGTCAGCAGC |
| (SEQ ID NO. | CD98-68 | CAGGTGCAACTGGTCGAGTCCGGCGGAGGCGTCGTGCAACCTG |
| 8778) | | GCAGGAGCCTCAGACTCTCCTGTGCTGCTAGCGGCTACACCGC |
| | | TACTAACTACGCCATGGGATGGGTGCGTAGGGCTCCAGGCAAG |
| | | GGAGAAGAGTGGGTTGCAACAATCGATAGCGACGGAAGAGCAT |
| | | CCTATGCAGACTCCGTAAAGGGGCGATTCACCATCTCCGCCGA |
| | | CACTAGTAAAAACACAGCTTACTTACAGATGAATAGCCTTCGT |
| | | GCCGAAGATACCGCCGTGTATTACTGTGGTAGACTGCAGTACT |
| | | CATCAGGATGGTACTCAGACTACIGGGGCCAAGGAACCCTGGT |
| | | TACAGTCAGCAGC |
| (SEQ ID NO. | CD98-80 | CAGGTGCAACTGGTCGAGTCCGGCGGAGGCGTCGTGCAACCTG |
| 8779) | | GCAGGAGCCTCAGACTCTCCTGTGCTGCTAGCGGCTTCTCCTT |
| | | TGATGACCTGGACATGGGATGGGCACGTCAGGCTCCAGGCAAG |
| | | GGACTTGAGTGGGTTGCAACAATCACCAACGGGGACTACACAC |
| | | GGTATAGTGACTCCGTAAAGGGGCGATTCACCATCTCCCGGGA |
| | | CAATAGTAAAAACACACTTTACTTACAGATGAATAGCCTTCGT |
| | | GCCGAAGATACCGCCGTGTATTACTGTGCTAGAGACCTCAGCG |
| | | GCTCACTGTACTTCGACTACTGGGGCCAAGGAACCCTGGTTAC |
| | | AGTCAGCAGC |
| (SEQ ID NO. | CD98-112 | CAGGTGCAACTGGTCGAGTCCGGCGGAGGCGTCGTGCAACCTG |
| 8780) | | GCAGGAGCCTCAGACTCTCCTGTGCTGCTAGCGGCTACACCGT |
| | | TTCTAACAACTGCATGGGATGGTTCCGTCAGGCTCCAGGCAAG |
| | | GAGCGAGAGTTAGTTGCAGIGATCGGCAGCGACGGACACGCAA |
| | | CCTATGCAGCCTCCGTAGAGGGGCGATTCACCATCTCCCGGGA |
| | | CAATGCCAAAAGGATGGTCTACTTACAGATGAATAGCCTTCGT |
| | | GCCGAAGATACCGCCGTGTATTACTGTGCTAGAGCGCACCCGC |
| | | GGGGCAGTGGGAGCTACTACTTCGACTACTGGGGCCAAGGAAC |
| | | CCTGGTTACAGTCAGCAGC |
| (SEQ ID NO. | CD98-3 | CAGGTGCAACTGGTCGAGTCCGGCGGAGGCGTCGTGCAACCTG |
| 8781) | | GCAGGAGCCTCAGACTCTCCTGTGCTGCTAGCGGCTTCCGATA |
| | | TAATAGCTACGCCATGGCCTGGGCACGTCAGGCTCCAGGCAAG |
| | | GGAGAAGAGTGGGTTGCAGCCATCGATGGGGACGGAACAACAG |
| | | ATTATGCAGACTCCGTAAAGGGGCGATTCACCATCTCCGCCGA |
| | | CACTAGTAAAAACACAGTCTACTTACAGATGAATAGCCTTCGT |
| | | GCCGAAGATACCGCCGTGTATTACTGTGCTACAGTGAAGAAGT |
| | | TCTGGAACGGGTACGCCTTCGACTCATGGGGCCAAGGAACCCT |
| | | GGTTACAGTCAGCAGC |
| (SEQ ID NO. | CD98-138 | CAGGTGCAACTGGTCGAGTCCGGCGGAGGCGTCGTGCAACCTG |
| 8782) | | GCAGGAGCCTCAGACTCTCCTGTGCTGCTAGCGGCTTCCCTTT |
| | | TGGTGGGTACTCGGTGGGATGGTTCCGTCAGGCTCCAGGCAAG |
| | | GAGCGAGAGGGTGTTGCAGTGATCGATAGGGACGGAAGTACAA |
| | | CCTATGCAGACTCCGTAAAGGGGCGATTCACCATCTCCCGGGA |
| | | CAATGCCAAAGACACACTTTACTTACAGATGAATAGCCTTCGT |
| | | GCCGAAGATACCGCCGTGTATTACTGTGCTAGAGGGGGCAGGA |
| | | AGGGCCTGGGGTGGTACTACTTCGACTACTGGGGCCAAGGAAC |
| | | CCTGGTTACAGTCAGCAGC |
| (SEQ ID NO. | CD98-35 | CAGGTGCAACTGGTCGAGTCCGGCGGAGGCGTCGTGCAACCTG |
| 8783) | | GCAGGAGCCTCAGACTCTCCTGTGCTGCTAGCGGCTTCTCCTT |
| | | TTCTAGCTACCCCATGACCTGGGTGCGTCAGGCTCCAGGCAAG |
| | | GGACCCGAGTGGGTTAGTATGATCAATAGGGACGGAAGTACAT |
| | | ATTATGGAGACTCCGTAAAGGGGCGATTCGCCATCTCCCGGGA |
| | | CAATGCCAAAAACACACTTTACTTACAGATGAATAGCCTTCGT |
| | | GCCGAAGATACCGCCGTGTATTACTGTGCTAGAGACGGCGGGT |
| | | CATATGACATGGACGTATGGGGCCAAGGAACCCTGGTTACAGT |
| | | CAGCAGC |
| (SEQ ID NO. | CD98-59 | CAGGTGCAACTGGTCGAGTCCGGCGGAGGCGTCGTGCAACCTG |
| 8784) | | GCAGGAGCCTCAGACTCTCCTGTGCTGCTAGCGGCTACACCTT |
| | | ACCTATGAGCACCGCATGGGCGAGGCAAGCACCTGGAAAAGGG |
| | | CTAGAATGGGTTGCTGCAATCGCCTCCGACGGGAGAACAGACT |
| | | ATGCTGACTCAGTCAAGGGGAGGTTTACCATTICGCGAGATAA |
| | | CTCCAAGAATACAGTGTATCTGCAAATGAATTCACTGCGCGCT |
| | | GAAGATACTGCCGTCTACTATTGCGCCACTCTGAGCATGGCGC |
| | | GGAATAGTGACTACTGGGGCCAAGGAACCCTGGTTACAGTCAG |
| | | CAGC |
| (SEQ ID NO. | CD98-7 | CAGGTGCAACTGGTCGAGTCCGGCGGAGGCGTCGTGCAACCTG |
| 8785) | | GCAGGAGCCTCAGACTCTCCTGTGCTGCTAGCGGCTTCACCAT |
| | | TTCTGGGTACACCATGCACTGGTTCCGTCAGGCTCCAGGCAAG |
| | | GGACTTGAGTGGGTTGCAAGTATCGATACGGGGGGAGACACAA |
| | | CCTATCTGCCCTCCGTAAAGGGGCGATTCACCATCTCCCGGGA |
| | | CAATAGTAAAAACACACTTTACTTACAGATGAATAGCCTTCGT |
| | | GCCGAAGATACCGCCGTGTATTACTGTGCTACAGACCGGAACG |
| | | GCGGCGGAGCGTTCGACGTGTGGGGCCAAGGAACCCTGGTTAC |
| | | AGTCAGCAGC |
| (SEQ ID NO. | CD98-71 | CAGGTGCAACTGGTCGAGTCCGGCGGAGGCGTCGTGCAACCTG |
| 8786) | | GCAGGAGCCTCAGACTCTCCTGTGCTGCTAGCGGCTTCATTTC |
| | | TACTTACTACATGAGTTGGGTGAGGCAAGCACCTGGAAAAGGG |
| | | CCCGAATGGGTTTCTACAACAGGAGCCGACGGGACAACATACT |
| | | ATGCTGACTCAGTCAACGGGAGGTTTACCGTCTCGCAGGATAA |
| | | CGCTAAGAATACAGTGTATCTGCAAATGAATTCACTGCGCGCT |
| | | GAAGATACTGCCGTCTACTATTGCGCCCGCTACGAGGATGGGC |
| | | CCGGCTTCGACATATGGGGCCAAGGAACCCTGGTTACAGTCAG |
| | | CAGC |
| (SEQ ID NO. | CD98-84 | CAGGTGCAACTGGTCGAGTCCGGCGGAGGCGTCGTGCAACCTG |
| 8787) | | GCAGGAGCCTCAGACTCTCCTGTGCTGCTAGCGGCTACACCTT |
| | | ACCTATGAGCATGGGATGGTACAGGCAAGCACCTGGAAAAGAC |
| | | CGGGAAGGCGTTGCTGCAATCGCCGGCGACGGGAGAACAGACT |
| | | ATGCTGACTCAGTCAAGGGGAGGTTTACCATTICGCGAGATAA |
| | | CTCCAAGAATACACTGTATCTGCAAATGAATTCACTGCGCGCT |
| | | GAAGATACTGCCGTCTACTATTGCGCCCGCGGAGCGGATTGGA |
| | | ACTATGGATACTGGTACTTCGACCTCTGGGGCCAAGGAACCCT |
| | | GGTTACAGTCAGCAGC |
| (SEQ ID NO. | CD98-9 | CAGGTGCAACTGGTCGAGTCCGGCGGAGGCGTCGTGCAACCTG |
| 8788) | | GCAGGAGCCTCAGACTCTCCTGTGCTGCTAGCGGCTTCCCTTT |
| | | TGGTGGGTACTCGGTGGGATGGTTCCGTCAGGCTCCAGGCAAG |
| | | GAGCGAGAGGGTGTTGCAGTGATCGATAGGGACGGAAGTACAA |
| | | CCTATGCAGACTCCGTAAAGGGGCGATTCACCATCTCCCGGGA |
| | | CAATGCCAATGACACACTTTACTTACAGATGAATAGCCTTCGT |
| | | GCCGAAGATACCGCCGTGTATTACTGTGCTAAGAGCGCCAAGT |
| | | ACTATTACGAGGGGTCATACTACTACGTGCATTTCGACTACTG |
| | | GGGCCAAGGAACCCTGGTTACAGTCAGCAGC |
| (SEQ ID NO. | CD98-94 | CAGGTGCAACTGGTCGAGTCCGGCGGAGGCGTCGTGCAACCTG |
| 8789) | | GCAGGAGCCTCAGACTCTCCTGTGCTGCTAGCGGCTTCACCAC |
| | | TACTACATACACCATGGGATGGTTCCGTCAGGCTCCAGGCAAG |
| | | GGACGAGAGTTAGITGCAGTGATCGATAGCGACGGAGACACAG |
| | | CCTATGCAGAGTCCGTAGAGGGGCGATTCACCATCTCCCGGGA |
| | | CAATGCCAAAAGGATGGTCTACTTACAGATGAATAGCCTTCGT |
| | | GCCGAAGATACCGCCGTGTATTACTGTGCTAGAGACAAGGGGG |
| | | GCTATGGAGACTACCCCTTCTTCCTCTTCGATTACTGGGGCCA |
| | | AGGAACCCTGGTTACAGTCAGCAGC |
| (SEQ ID NO. | ALK1-13 | CAGGTGCAACTGGTCGAGTCCGGCGGAGGCGTCGTGCAACCTG |
| 8790) | | GCAGGAGCCTCAGACTCTCCTGTGCTGCTAGCGGCTTCACCTT |
| | | TTCTAGCTACGCCATGTCATGGTTCCGTCAGGCTCCAGGCAAG |
| | | GGACGAGAGTTAGTTGCAGCCATCGATAGCGACGGAAGTACAT |
| | | CCTATGCAGACTCCGTAGAGGGGCGATTCACCATCTCCCGGGA |
| | | CAATGCCAAAAGGATGGTCTACTTACAGATGAATAGCCTTCGT |
| | | GCCGAAGATACCGCCGTGTATTACTGTGCTAGAGTGGATTTCT |
| | | ACTATTACTACATGGACGTGTGGGGCCAAGGAACCCTGGTTAC |
| | | AGTCAGCAGC |
| (SEQ ID NO. | FLT1-39 | CAGGTGCAACTGGTCGAGTCCGGCGGAGGCGTCGTGCAACCTG |
| 8791) | | GCAGGAGCCTCAGACTCTCCTGTGCTGCTAGCGGCGCCACCTC |
| | | TAATACATACTACATGGGATGGTTCCGTCAGGCTCCAGGCAAG |
| | | GAGCGAGAGGGTGTTGCAACAATCCGGAGGGACGACCTGACAG |
| | | CCTATACAGACTCCGTAAAGGGGCGATTCACCATCTCCCGGGA |
| | | CAATACAAAAAACACACTTTACTTACAGATGAATAGCCTTCGT |
| | | GCCGAAGATACCGCCGTGTATTACTGTGCTAGACTGGATAGCA |
| | | ACGGCTACAGCTACTGGGGCCAAGGAACCCTGGTTACAGTCAG |
| | | CAGC |
| (SEQ ID NO. | FLT1-4 | CAGGTGCAACTGGTCGAGTCCGGCGGAGGCGTCGTGCAACCTG |
| 8792) | | GCAGGAGCCTCAGACTCTCCTGTGCTGCTAGCGGCAGATCCAA |
| | | TGAAAACTACTTCCTGGCCTGGTACCGTCAGGCTCCAGGCAAG |
| | | GACCGAGAGGGTGTTGCAGTGATCTATAGCGACGGAAAGACAG |
| | | TCTATGCAGACTCCGTAAAGGGGCGATTCACCATCTCCCGGGA |
| | | CAATAGTAAAAACACACTTTACTTACAGATGAATAGCCTTCGT |
| | | GCCGAAGATACCGCCGTGTATTACTGTACTGAGTACGGCTTCA |
| | | AGAATGGATACGCGTTCGACGCCTGGGGCCAAGGAACCCTGGT |
| | | TACAGTCAGCAGC |
| (SEQ ID NO. | FLT1-49 | CAGGTGCAACTGGTCGAGTCCGGCGGAGGCGTCGTGCAACCTG |
| 8793) | | GCAGGAGCCTCAGACTCTCCTGTGCTGCTAGCGGCGCCACCTC |
| | | TAATACATACTACATGGGATGGTTCCGTCTGGCTCCAGGCAAG |
| | | GAGCGAGAGGGTGTTGCAAGTATCTATACGCAGGACGGAAGAA |
| | | CCGCTTACGCCGATTCAGTGAAGGGCCGGTTTACCATTTCCGA |
| | | GGATAACGCTAAGAACACTGTGTATCTTCAAATGAACTCCTTA |
| | | CGGGCTGAAGACACCGCAGTCTACTATTGTGCCAGGATCGACA |
| | | TCGATGGATACGCGTACTGGGGCCAAGGAACCCTGGTTACAGT |
| | | CAGCAGC |
| (SEQ ID NO. | FLT1-6 | CAGGTGCAACTGGTCGAGTCCGGCGGAGGCGTCGTGCAACCTG |
| 8794) | | GCAGGAGCCTCAGACTCTCCTGTGCTGCTAGCGGCAGTTCCGA |
| | | TGAAATCTACGCCATGGCCTGGTTCCGTCAGGCTCCAGGCAAG |
| | | GGACGAGAGTTAGTTGCAGCCATCGAAAACGACGGAACAACAA |
| | | CCTATGCACACTCCGTAAAGGGGCGATTCACCATCTCCGCCGA |
| | | CACTAGTAAAAACACAGCTTACTTACAGATGAATAGCCTTCGT |
| | | GCCGAAGATACCGCCGTGTATTACTGTGCTAGAGACTCAACGT |
| | | CATGGTGGTACTTCGACCTGTGGGGCCAAGGAACCCTGGTTAC |
| | | AGTCAGCAGC |
| (SEQ ID NO. | IGF1R-17 | CAGGTGCAACTGGTCGAGTCCGGCGGAGGCGTCGTGCAACCTG |
| 8795) | | GCAGGAGCCTCAGACTCTCCTGTGCTGCTAGCGGCCCATCCGC |
| | | TTCTGCAAAGGCCATGGCCTGGTTCCGTCAGTCTGTGGGCAAG |
| | | GAGCGAGAGGGTATTGCAGCCATCCGGCACGACGGAGGAGAGA |
| | | CCTGGTACGCCGCCTCAGTGAAGGGCCGGTTTACCATTTCCAG |
| | | GGATAACGCTAAGAACACTCTGTATCTTCAAATGAACTCCTTA |
| | | CGGGCTGAAGACACCGCAGTCTACTATTGTGTGAGGGATCACG |
| | | GCGGCGCCAGGGACATCTGGGGCCAAGGAACCCTGGTTACAGT |
| | | CAGCAGC |
| (SEQ ID NO. | IGF1R-37 | CAGGTGCAACTGGTCGAGTCCGGCGGAGGCGTCGTGCAACCTG |
| 8796) | | GCAGGAGCCTCAGACTCTCCTGTGCTGCTAGCGGCCTGTCCGT |
| | | TTCTGACAGCTCGATGGCCTGGTTCCGTCAGCGTCCAGGCCAG |
| | | GAGCGAGAGGGTATTGCAGCCATCGATACGGGGGACGGAAGTA |
| | | CCTATTACCTCAATTCAGTGGAGGGCCGGTTTACCATTTCCCA |
| | | CGATAACGCTAAGAACACTCTGTATCTTCAAATGAACTCCTTA |
| | | CGGGCTGAAGACACCGCAGTCTACTATTGTGTGAGGCAGCAGC |
| | | GGGATGGACTGGTGAATTTCTGGGGCCAAGGAACCCTGGTTAC |
| | | AGTCAGCAGC |
| (SEQ ID NO. | INSULINR- | CAGGTGCAACTGGTCGAGTCCGGCGGAGGCGTCGTGCAACCTG |
| 8797) | 87 | GCAGGAGCCTCAGACTCTCCTGTGCTGCTAGCGGCTTCACCGT |
| | | TGGTGCAAGGGCCATGGCCTGGTACCGTCAGGCTCCAGGCAAG |
| | | GACCGAGAGGGTGTTGCAGCCATCGATAGCGACGGAATCGCAT |
| | | CCTATGCAGACTCCGTAAAGGGGCGATTCACCATCTCCCGGGA |
| | | CAATGCCAAAAACACACTTTACTTACAGATGAATAGCCTTCGT |
| | | GCCGAAGATACCGCCGTGTATTACTGTGCTAGAGTGTCAGGGT |
| | | CATATGGAGACTACTTCGACTACTGGGGCCAAGGAACCCTGGT |
| | | TACAGTCAGCAGC |
| (SEQ ID NO. | INSULINR- | CAGGTGCAACTGGTCGAGTCCGGCGGAGGCGTCGTGCAACCTG |
| 8798) | 96 | GCAGGAGCCTCAGACTCTCCTGTGCTGCTAGCGGCTACACCTT |
| | | TGATGAGAGCGACATGGGATGGTTCCGTCAGGCTCCAGGCAAG |
| | | GGACGAGAGTTAGTTAGTACAATCTCCCCGGACGGAACAACAT |
| | | ATTATGCAGACTCCGTAGAGGGGCGATTCACCATCTCCCGGGA |
| | | CAATGCCAAAAGGATGGTCTACTTACAGATGAATAGCCTTCGT |
| | | GCCGAAGATACCGCCGTGTATTACTGTGCTAGATGGCGGAGGT |
| | | CATGGTTCGACACGTGGGGCCAAGGAACCCTGGTTACAGTCAG |
| | | CAGC |
| (SEQ ID NO. | LDLR-13 | CAGGTGCAACTGGTCGAGTCCGGCGGAGGCGTCGTGCAACCTG |
| 8799) | | GCAGGAGCCTCAGACTCTCCTGTGCTGCTAGCGGCTACACCGT |
| | | TGCTACATACTTCATCGGATGGTTCCGTCAGGCTCCAGGCAAG |
| | | GCCCGAGAGGGTGTTGCAACAATCACCAGCGACGGAAGAACAA |
| | | AATATGCAGACTCCGTAAAGGGGCGATTCACCATCTCCCGGGA |
| | | CAATGCCAAAAACACAGTCTACTTACAGATGAATAGCCTTCGT |
| | | GCCGAAGATACCGCCGTGTATTACTGTGCTAGTAGGTCAATAG |
| | | CCGCCGCCGGGGAGGGCTACTGGGGCCAAGGAACCCTGGTTAC |
| | | AGTCAGCAGC |
| (SEQ ID NO. | LRP1C2-46 | CAGGTGCAACTGGTCGAGTCCGGCGGAGGCGTCGTGCAACCTG |
| 8800) | | GCAGGAGCCTCAGACTCTCCTGTGCTGCTAGCGGCTACCCTTC |
| | | TTGTATGGGGTGGGCACGGCAGGCACCTGGGAAAGGATTGGAG |
| | | TGGGTCGCCTGTATTGAGAGAAGAGGCAGGATACACTACGCAG |
| | | CCTCTGTGAAGGGCCGGTTCACGATTTCGCGAGACAATTCCAA |
| | | GAATACATTGTACCTGCAAATGAATTCCTTGCGGGCAGAAGAT |
| | | ACCGCTGTTTACTATTGCGCTAGCCAGGATAGTAGCTCATACG |
| | | ACGCCTTCGACATATGGGGCCAAGGAACCCTGGTTACAGTCAG |
| | | CAGC |
| (SEQ ID NO. | LRP1C3-24 | CAGGTGCAACTGGTCGAGTCCGGCGGAGGCGTCGTGCAACCTG |
| 8801) | | GCAGGAGCCTCAGACTCTCCTGTGCTGCTAGCGGCGGAGCCTA |
| | | TCGTAAGTACTACATGGGATGGTTCCGTCAGGCTCCAGGCAAG |
| | | GGACGAGAGTTAGTTGCAGCCATCGAAAGCGACGGAACAACAG |
| | | ATTATGCAGACTCCGTAGAGGGGCGATTCACCATCTCCCGGGA |
| | | CAATGCCAAAAGGATGGTCTACTTACAGATGAATAGCCTTCGT |
| | | GCCGAAGATACCGCCGTGTATTACTGTGCTAGTGTGATCGGGG |
| | | GCAATAGTGAGGACTACTGGGGCCAAGGAACCCTGGTTACAGT |
| | | CAGCAGC |
| (SEQ ID NO. | LRP1C4-33 | CAGGTGCAACTGGTCGAGTCCGGCGGAGGCGTCGTGCAACCTG |
| 8802) | | GCAGGAGCCTCAGACTCTCCTGTGCTGCTAGCGGCGACGCCAA |
| | | TGAATTCGAGTGGATCGGATGGTACCGTCAGGCTCCAGGCAAG |
| | | GGACGAGAGTTAGTTGCAAGAATCGGCAGCAGCGGACCAAGAT |
| | | ATGCTGACTCAGTCGAGGGGAGGTTTACCATTICGCGAGATAA |
| | | CTCCAAGAATACACTGTATCTGCAAATGAATTCACTGCGCGCT |
| | | GAAGATACTGCCGTCTACTATTGCGCCGCTACACACTGTAGCT |
| | | TCCTCACAACGAGCGTAGCAGGCTGCACAGATGACAAGTACTG |
| | | GGGCCAAGGAACCCTGGTTACAGTCAGCAGC |
| (SEQ ID NO. | SCARB1-3 | CAGGTGCAACTGGTCGAGTCCGGCGGAGGCGTCGTGCAACCTG |
| 8803) | | GCAGGAGCCTCAGACTCTCCTGTGCTGCTAGCGGCTTCACCTT |
| | | AGGTACAAACTGCATGGCCTGGTTCCGTCAGGCTCCAGGCAAG |
| | | GAGCGAGAGCGTGTTGCAAGTATCGGCAGCGACGGAAGAACAT |
| | | ATTATGCAGACTCCGTAAAGGGGCGATTCACCATCTCCCGGGA |
| | | CAATAGTAAAAACACACTTTACTTACAGATGAATAGCCTTCGT |
| | | GCCGAAGATACCGCCGTGTATTACTGTGCTAGAGCGCCCGGGA |
| | | TCCAGCTGTGGAAGTTCGACTACTGGGGCCAAGGAACCCTGGT |
| | | TACAGTCAGCAGC |
| (SEQ ID NO. | SCARB1- | CAGGTGCAACTGGTCGAGTCCGGCGGAGGCGTCGTGCAACCTG |
| 8804) | 49 | GCAGGAGCCTCAGACTCTCCTGTGCTGCTAGCGGCTTCACCAA |
| | | TTCTAAGACGTACCTGGGATGGGTGCGTAGGGCTCCAGGCAAG |
| | | GGACTTGAGTGGGTTGCAGCCATCGCCCCGAGCACAGGAAGTA |
| | | CCTATTACGACGATTCAGTGAAGGGCCGGTTTACCATTTCCAG |
| | | GGATAACTCTAAGAACACTCTGTATCTTCAAATGAACTCCTTA |
| | | CGGGCTGAAGACACCGCAGTCTACTATTGTGCCAGCCAGGGGT |
| | | CATCATGGTACGAGAATGACTACTGGGGCCAAGGAACCCTGGT |
| | | TACAGTCAGCAGC |
| (SEQ ID NO. | IGF1R-55 | CAGGTGCAACTGGTCGAGTCCGGCGGAGGCGTCGTGCAACCTG |
| 8805) | | GCAGGAGCCTCAGACTCTCCTGTGCTGCTAGCGGCTTCCGATT |
| | | TGATGACTACGCCATGGGATGGTTCCGTCAGGCTCCAGGCAAG |
| | | GAGCGAGAGGGTGTTGCAGGATACAAAAGCGACGGAAGTACAA |
| | | CCTATGCAGACTCCGTAAAGGGGCGATTCACCATCTCCCGGGA |
| | | CAATAGTAAAAACACACTTTACTTACAGATGAATAGCCTTCGT |
| | | GCCGAAGATACCGCCGTGTATTACTGTGCTAGTAGGGCCCTGT |
| | | ACGGCGGAAAGCCGTTCGTGATCTGGGGCCAAGGAACCCTGGT |
| | | TACAGTCAGCAGC |
| (SEQ ID NO. | LRP1C4-31 | CAGGTGCAACTGGTCGAGTCCGGCGGAGGCGTCGTGCAACCTG |
| 8806) | | GCAGGAGCCTCAGACTCTCCTGTGCTGCTAGCGGCAGTCCTGA |
| | | TCGTAGGGCGTGCATGGGATGGTACCGTCAGGCTCCAGGCAAG |
| | | GAGCGAGAGCGTGTTGCAGAGATCGATACGGACGGAAACACAT |
| | | CCTATGCAGACTCCGTAAAGGGGCGATTCACCATCTCCCGGGA |
| | | CAATAGTAAAAACACAGTCTACTTACAGATGAATAGCCTTCGT |
| | | GCCGAAGATACCGCCGTGTATTACTGTGCTCTGCAGCCCGGGT |
| | | GCCCCCCAGCGACGCTCTTCTACTGGAGAAAAACAGGATTCGG |
| | | TAACTGGGGCCAAGGAACCCTGGTTACAGTCAGCAGC |
| (SEQ ID NO. | LRP1C4-80 | CAGGTGCAACTGGTCGAGTCCGGCGGAGGCGTCGTGCAACCTG |
| 8807) | | GCAGGAGCCTCAGACTCTCCTGTGCTGCTAGCGGCTTCACCTT |
| | | TGATGACACGGACATGGGATGGTTCCGTCAGGCTCCAGGCAAG |
| | | GAGCGAGAGCGTGTTAGTACAATCAATAGCGACGGAGGAACAA |
| | | CCTATTACGCCGATTCAGTGAAGGGCCGGTTTACCATTTCCAG |
| | | GGATAACTCTAAGAACACTCTGTATCTTCAAATGAACTCCTTA |
| | | CGGGCTGAAGACACCGCAGTCTACTATTGTGCCAGGGCCAGGG |
| | | TAACCGACGCGGGGTGGCAGTACTTCGACTATTGGGGCCAAGG |
| | | AACCCTGGTTACAGTCAGCAGC |
| (SEQ ID NO. | ALK1-15 | CAGGTGCAACTGGTCGAGTCCGGCGGAGGCGTCGTGCAACCTG |
| 8808) | | GCAGGAGCCTCAGACTCTCCTGTGCTGCTAGCGGCTTCACCTT |
| | | TTCTGACTACTACATCGGATGGTTCCGTCAGGCTCCAGGCAAG |
| | | GAGCGAGAGCGTGTTGCACAGATCGATAAGAACGGAGTGACAA |
| | | ATTATGCAGACGCCGTAAAGGGGCGATTCACCATCTCCCGGGA |
| | | CAATAGTAAAAACACACTTTACTTACAGATGAATAGCCTTCGT |
| | | GCCGAAGATACCGCCGTGTATTACTGTGCTGGAGTGGATGCGT |
| | | TCAATTACATGGAGGTATGGGGCCAAGGAACCCTGGTTACAGT |
| | | CAGCAGC |
| (SEQ ID NO. | IGF1R-13 | CAGGTGCAACTGGTCGAGTCCGGCGGAGGCGTCGTGCAACCTG |
| 8809) | | GCAGGAGCCTCAGACTCTCCTGTGCTGCTAGCGGCGACTTTAA |
| | | TGATGCAAGGGCCGAGTGGGGGTGGTTTAGGCAAGCACCTGGG |
| | | AAGGGCCGGGAATTGGTGGCCAGTCTCGCGAGCGACGGAAGTA |
| | | CCATTTACGCCAATCCCGTGGAGGGCCGGTTTACCATTTCCAG |
| | | GGATAACGCTAAGAACACTCTGTATCTTCAAATGAACTCCTTA |
| | | CGGGCTGAAGACACCGCAGTCTACTATTGTGCCAGGTCAGGGG |
| | | CCTCAAGTAGCTGGTACTGGTTCGACTACTGGGGCCAAGGAAC |
| | | CCTGGTTACAGTCAGCAGC |
| (SEQ ID NO. | IGF1R-96 | CAGGTGCAACTGGTCGAGTCCGGCGGAGGCGTCGTGCAACCTG |
| 8810) | | GCAGGAGCCTCAGACTCTCCTGTGCTGCTAGCGGCAGTATTCA |
| | | TAATAGGAGGCACATGGGATGGTTCCGTCAGGCTGCAGGCAAG |
| | | GAGCGAGAGGGTGTTGCAGCCATCGATATAGCGGGAAACACAC |
| | | GGATTAGTGACTCCGTAAAGGGGCGATTCACCATCTCCCATGA |
| | | CAAAGACGAAAACAGACTTTACTTACAGATGAATAGCCTTCGT |
| | | GCCGAAGATACCGCCGTGTATTACTGTGCTATCCAGTCAAGCG |
| | | ACGGCAGAGGGACGGTATACTGGGGCCAAGGAACCCTGGTTAC |
| | | AGTCAGCAGC |
| (SEQ ID NO. | INSULINR- | CAGGTGCAACTGGTCGAGTCCGGCGGAGGCGTCGTGCAACCTG |
| 8811) | 86 | GCAGGAGCCTCAGACTCTCCTGTGCTGCTAGCGGCAGACGAGG |
| | | TAATAACTACTCGATGGCCTGGTACCGTCAGGCTCCAGGCAAG |
| | | GACCGAGAGGGTGTTGCAGCCATCGATAGCGACGGAGACACAT |
| | | CCTATGCAGACCCCGTAAAGGGGCGATTCACCATCTCCCGGGA |
| | | CAATAGTAAAAACACACTTTACTTACAGATGAATAGCCTTCGT |
| | | GCCGAAGATACCGCCGTGTATTACTGTGCTGTGGCGACCGGGG |
| | | AGTATAGAAGGTACTTCGACGTATGGGGCCAAGGAACCCTGGT |
| | | TACAGTCAGCAGC |
| (SEQ ID NO. | LRP1C3-93 | CAGGTGCAACTGGTCGAGTCCGGCGGAGGCGTCGTGCAACCTG |
| 8812) | | GCAGGAGCCTCAGACTCTCCTGTGCTGCTAGCGGCTTCGCCTT |
| | | TACTAAGTACCACATGTCATGGTTCCGTCAGGCTCCAGGCAAG |
| | | GGACGAGAGTTAGTTAGTCACATCTCCGCGGGGGGAAGAACAT |
| | | ATTATAGTGACTCCGTAGAGGGGCGATTCACCATCTCCCGGGA |
| | | CAATGCCAAAAGGATGGTCTACTTACAGATGAATAGCCTTCGT |
| | | GCCGAAGATACCGCCGTGTATTACTGTGTTAAGGAGTCAAGGC |
| | | CCCACAGTTACGGGGACCACTGGGGCCAAGGAACCCTGGTTAC |
| | | AGTCAGCAGC |

TABLE 7
Table providing exemplary list of shuttle amino acid sequences

| SEQ ID NO. | ID | AMINO ACID SEQUENCE |
|---|---|---|
| (SEQ ID NO. | TfR-1409 | QVQLVESGGGVVQPGRSLRLSCAASGFSFSNFGMSWVRQARGK |
| 8813) | | GLEWVSSTGSDGTAYYADSVKGRFTISRDNAKNTLYLQMNSLR |
| | | AEDTAVYYCARAPSRHGFDYWGQGTLVTVSS |
| (SEQ ID NO. | TfR-1409- | QVQLVESGGGVVQPGRSLRLSCAASGFSFSNEGMSWVRQARGK |
| 8814) | 51 | GLEWVSSIGSDGRAYYADSVKGRFTISRDNAKNTLYLQMNSLR |
| | | AEDTAVYYCARAPSRHGFDYWGOGTLVTVSS |
| (SEQ ID NO. | TfR-1409-6 | QVQLVESGGGVVQPGRSLRLSCAASGFSESNEGMSWVRQARGK |
| 8815) | | GLEWVSSVGSDGTAYYADSVKGRFTISRDNAKNTLYLQMNSLR |
| | | AEDTAVYYCARAPSRHGFDYWGQGTLVTVSS |
| (SEQ ID NO. | TfR-1409- | QVQLVESGGGVVQPGRSLRLSCAASGFSFSNFGMSWVRQAPGK |
| 8816) | 25 | GLEWVSSTGSDGTAYYADSVKGRFTISRDNAKNTLHLQMNSLR |
| | | AEDTAVYYCARAPSRHGFDYWGQGTLVTVSS |
| (SEQ ID NO. | TfR-455 | QVQLVESGGGVVQPGRSLRLSCAASGFAVDASDMGWFRQAPGK |
| 8817) | | GRELVSSISSDNDTYYADSVEGRFTISRDNAKRMVYLQMNSLR |
| | | AEDTAVYYCASGRFLEPDYWGQGTLVTVSS |
| (SEQ ID NO. | TfR-299 | QVQLVESGGGVVQPGRSLRLSCAASGFTFDDSDMGWFRQAPGK |
| 8818) | | GRELVAAINTGGGKTYYAATVEGRFTISRDNAKRMVYLQMNSL |
| | | RAEDTAVYYCASGRFLEPDYWGQGTLVTVSS |
| (SEQ ID NO. | TfR-891 | QVQLVESGGGVVQPGRSLRLSCAASGLTEDDSDMGWFRQAPGK |
| 8819) | | ERERVSTISSDGTPHYDDSVKGRFTISRDNSKNTLYLQMNSLR |
| | | AEDTAVYYCARRDGGSWNEDYWGQGTLVTVSS |
| (SEQ ID NO. | TfR-732 | QVQLVESGGGVVQPGRSLRLSCAASGFTFDGSDIAWVRRAPGK |
| 8820) | | GEEWVSTISSDGTVYYSDPVKGRFTISADTSKNTAYLQMNSLR |
| | | AEDTAVYYCAISSWYGDEDYWGQGTLVTVSS |
| (SEQ ID NO. | TfR-734 | QVQLVESGGGVVQPGRSLRLSCAASGHILNYWYMGWVRRAPGK |
| 8821) | | GEEWVAGISPGGTVTVYADSVKGRFTISRDNSKNTLYLQMNSL |
| | | RAEDTAVYYCARGGQGGDAWAFDYWGOGTLVTVSS |
| (SEQ ID NO. | TfR-358 | QVQLVESGGGVVQPGRSLRLSCAASGFGVASSDMGWFRQAPGK |
| 8822) | | GRELVASINTDGSTIYAESVEGRFTISRDNAKRMVYLQMNSLR |
| | | AEDTAVYYCAAYDTSAYHSPFDYWGQGTLVTVSS |
| (SEQ ID NO. | TfR-85 | QVQLVESGGGVVQPGRSLRLSCAASGYTERSASMGWVRRAPGK |
| 8823) | | GEEWVAVIDSEGHTIYADSVKGRFTISADTSKNTAYLQMNSLR |
| | | AEDTAVYYCAKDIYGDYGGPDYWGOGTLVTVSS |
| (SEQ ID NO. | TfR-448 | QVQLVESGGGVVQPGRSLRLSCAASGTRRPNYVTWERQAPLNE |
| 8824) | | ROVVAGIDSAGTTTYADSVKGRFTISQDNAKNTVYLQMNSLRA |
| | | EDTAVYYCASGISSSSFYPFDSWGQGTLVTVSS |
| (SEQ ID NO. | TfR-1573 | QVQLVESGGGVVQPGRSLRLSCAASGENEDDSDMGWFRQAPGK |
| 8825) | | GRELVSSIASDGATYYADSVEGRFTISRDNAKRMVYLQMNSLR |
| | | AEDTAVYYCARDSPSLRAFDSWGQGTLVTVSS |
| (SEQ ID NO. | TfR-1417 | QVQLVESGGGVVQPGRSLRLSCAASGTTYSRQYCMGWARQAPG |
| 8826) | | KGLEWVSCIDDDGNTYYADSVKGRFTISRDNSKNTLYLQMNSL |
| | | RAEDTAVYYCARDPGLSGDFDYWGQGTLVTVSS |
| (SEQ ID NO. | TfR-1090 | QVQLVESGGGVVQPGRSLRLSCAASGITYRGPCMGWYRQAPGK |
| 8827) | | GLEWVATLDSDGSTTYADSVKGRFTISRDNSKNTLYLQMNSLR |
| | | AEDTAVYYCAMYMTGGGGVAFDYWGQGTLVTVSS |
| (SEQ ID NO. | TfR-1415 | QVQLVESGGGVVQPGRSLRLSCAASGFTFSKYAMNWARQAPGK |
| 8828) | | GLEWVAFIDTAGRTIYADSVKGRFTISRDNSKNTLYLQMNSLR |
| | | AEDTAVYYCAPSYGDSGDYFDYWGQGTLVTVSS |
| (SEQ ID NO. | CD98-11 | QVQLVESGGGVVQPGRSLRLSCAASGFPFSSYGMGWFRQAPGK |
| 8829) | | EREGVAGVNTGGRTSYAESVKGRFTISRDNTRNTLYLQMNSLR |
| | | AEDTAVYYCARIRAAGTVAPYFDYWGQGTLVTVSS |
| (SEQ ID NO. | CD98-74 | QVQLVESGGGVVQPGRSLRLSCAASGYVAGYVGWYRQAPGKDR |
| 8830) | | EGVAAIASDGMTAYAHSVKGRFTISRDNSKNTLYLQMNSLRAE |
| | | DTAVYYCASGYCSGSGCYFDSWGQGTLVTVSS |
| (SEQ ID NO. | CD98-82 | QVQLVESGGGVVQPGRSLRLSCAASGFRYNSYAMAWARQAPGK |
| 8831) | | GLEWVAAIAGDGRTDYADSVKGRFTISRDNSKNTLYLQMNSLR |
| | | AEDTAVYYCAREDTAAFDYWGQGTLVTVSS |
| (SEQ ID NO. | CD98-87 | QVQLVESGGGVVQPGRSLRLSCAASGYRSNGYYMGWFRQASGK |
| 8832) | | EREGVAVIDSGGSTSYADSVKGRFTISLDNAKNTLYLQMNSLR |
| | | AEDTAVYYCARGVKRYGDGGTDLYYYFDYWGQGTLVTVSS |
| (SEQ ID NO. | CD98-96 | QVQLVESGGGVVQPGRSLRLSCAASGYTLPMSTAWARQAPGKG |
| 8833) | | LEWVAAIASDGRTDYADSVKGRFTISRDNSKNTVYLQMNSLRA |
| | | EDTAVYYCATLWWYGGRTFDSWGQGTLVTVSS |
| (SEQ ID NO. | CD98-39 | QVQLVESGGGVVQPGRSLRLSCAASGFTEDDEDMGWYRQAPGK |
| 8834) | | DREGVAVIRSDGILAYSDSVKGRFTISRDNSKNTVYLQMNSLR |
| | | AEDTAVYYCARSRSNYSSDAYAYYWEDVWGQGTLVTVSS |
| (SEQ ID NO. | CD98-47 | QVQLVESGGGVVQPGRSLRLSCAASGGFDDADAEWGWARQAPG |
| 8835) | | KGLEWVAAIAGDGRTDYAGSVKGRFTISRDNSKNTVYLQMNSL |
| | | RAEDTAVYYCAKNGQSGFSFDPWGQGTLVTVSS |
| (SEQ ID NO. | CD98-53 | QVQLVESGGGVVQPGRSLRLSCAASGYTLPMSTAWARQAPGKG |
| 8836) | | LEWVAAIASDGRTDYADSVKGRFTISRDNSKNTVYLQMNSLRA |
| | | EDTAVYYCASLSRGTYSSGWKWDDYWGQGTLVTVSS |
| (SEQ ID NO. | CD98-62 | QVQLVESGGGVVQPGRSLRLSCAASGFTFSSYAMSWFRQALGK |
| 8837) | | DREGVAAIDSDGTTSYGESVKGRFTISRDNSKNTVYLQMNSLR |
| | | AEDTAVYYCARAWGVGDDYYRMDYWGQGTLVTVSS |
| (SEQ ID NO. | CD98-68 | QVQLVESGGGVVQPGRSLRLSCAASGYTATNYAMGWVRRAPGK |
| 8838) | | GEEWVATIDSDGRASYADSVKGRFTISADTSKNTAYLQMNSLR |
| | | AEDTAVYYCGRLQYSSGWYSDYWGQGTLVTVSS |
| (SEQ ID NO. | CD98-80 | QVQLVESGGGVVQPGRSLRLSCAASGFSFDDLDMGWARQAPGK |
| 8839) | | GLEWVATITNGDYTRYSDSVKGRFTISRDNSKNTLYLQMNSLR |
| | | AEDTAVYYCARDLSGSLYFDYWGQGTLVTVSS |
| (SEQ ID NO. | CD98-112 | QVQLVESGGGVVQPGRSLRLSCAASGYTVSNNCMGWFRQAPGK |
| 8840) | | ERELVAVIGSDGHATYAASVEGRETISRDNAKRMVYLQMNSLR |
| | | AEDTAVYYCARAHPRGSGSYYFDYWGQGTLVTVSS |
| (SEQ ID NO. | CD98-3 | QVQLVESGGGVVQPGRSLRLSCAASGFRYNSYAMAWARQAPGK |
| 8841) | | GEEWVAAIDGDGTTDYADSVKGRFTISADTSKNTVYLQMNSLR |
| | | AEDTAVYYCATVKKFWNGYAFDSWGQGTLVTVSS |
| (SEQ ID NO. | CD98-138 | QVQLVESGGGVVQPGRSLRLSCAASGFPFGGYSVGWFRQAPGK |
| 8842) | | EREGVAVIDRDGSTTYADSVKGRFTISRDNAKDTLYLQMNSLR |
| | | AEDTAVYYCARGGRKGLGWYYFDYWGQGTLVTVSS |
| (SEQ ID NO. | CD98-35 | QVQLVESGGGVVQPGRSLRLSCAASGFSFSSYPMTWVRQAPGK |
| 8843) | | GPEWVSMINRDGSTYYGDSVKGRFAISRDNAKNTLYLQMNSLR |
| | | AEDTAVYYCARDGGSYDMDVWGQGTLVTVSS |
| (SEQ ID NO. | CD98-59 | QVQLVESGGGVVQPGRSLRLSCAASGYTLPMSTAWARQAPGKG |
| 8844) | | LEWVAAIASDGRTDYADSVKGRFTISRDNSKNTVYLQMNSLRA |
| | | EDTAVYYCATLSMARNSDYWGQGTLVTVSS |
| (SEQ ID NO. | CD98-7 | QVQLVESGGGVVQPGRSLRLSCAASGFTISGYTMHWFRQAPGK |
| 8845) | | GLEWVASIDTGGDTTYLPSVKGRFTISRDNSKNTLYLQMNSLR |
| | | AEDTAVYYCATDRNGGGAFDVWGOGTLVTVSS |
| (SEQ ID NO. | CD98-71 | QVQLVESGGGVVQPGRSLRLSCAASGFISTYYMSWVRQAPGKG |
| 8846) | | PEWVSTTGADGTTYYADSVNGRFTVSQDNAKNTVYLQMNSLRA |
| | | EDTAVYYCARYEDGPGFDIWGQGTLVTVSS |
| (SEQ ID NO. | CD98-84 | QVQLVESGGGVVQPGRSLRLSCAASGYTLPMSMGWYRQAPGKD |
| 8847) | | REGVAAIAGDGRTDYADSVKGRFTISRDNSKNTLYLQMNSLRA |
| | | EDTAVYYCARGADWNYGYWYFDLWGOGTLVTVSS |
| (SEQ ID NO. | CD98-9 | QVQLVESGGGVVQPGRSLRLSCAASGFPEGGYSVGWFRQAPGK |
| 8848) | | EREGVAVIDRDGSTTYADSVKGRFTISRDNANDTLYLQMNSLR |
| | | AEDTAVYYCAKSAKYYYEGSYYYVHFDYWGOGTLVTVSS |
| (SEQ ID NO. | CD98-94 | QVQLVESGGGVVQPGRSLRLSCAASGFTTTTYTMGWFRQAPGK |
| 8849) | | GRELVAVIDSDGDTAYAESVEGRETISRDNAKRMVYLQMNSLR |
| | | AEDTAVYYCARDKGGYGDYPFFLEDYWGQGTLVTVSS |
| (SEQ ID NO. | ALK1-13 | QVQLVESGGGVVQPGRSLRLSCAASGFTFSSYAMSWFROAPGK |
| 8850) | | GRELVAAIDSDGSTSYADSVEGRETISRDNAKRMVYLQMNSLR |
| | | AEDTAVYYCARVDFYYYYMDVWGQGTLVTVSS |
| (SEQ ID NO. | FLT1-39 | QVQLVESGGGVVQPGRSLRLSCAASGATSNTYYMGWFRQAPGK |
| 8851) | | EREGVATIRRDDLTAYTDSVKGRFTISRDNTKNTLYLQMNSLR |
| | | AEDTAVYYCARLDSNGYSYWGOGTLVTVSS |
| (SEQ ID NO. | FLT1-4 | QVQLVESGGGVVQPGRSLRLSCAASGRSNENYFLAWYRQAPGK |
| 8852) | | DREGVAVIYSDGKTVYADSVKGRFTISRDNSKNTLYLQMNSLR |
| | | AEDTAVYYCTEYGFKNGYAFDAWGQGTLVTVSS |
| (SEQ ID NO. | FLT1-49 | QVQLVESGGGVVQPGRSLRLSCAASGATSNTYYMGWFRLAPGK |
| 8853) | | EREGVASIYTQDGRTAYADSVKGRFTISEDNAKNTVYLQMNSL |
| | | RAEDTAVYYCARIDIDGYAYWGOGTLVTVSS |
| (SEQ ID NO. | FLT1-6 | QVQLVESGGGVVQPGRSLRLSCAASGSSDEIYAMAWFROAPGK |
| 8854) | | GRELVAAIENDGTTTYAHSVKGRFTISADTSKNTAYLQMNSLR |
| | | AEDTAVYYCARDSTSWWYFDLWGQGTLVTVSS |
| (SEQ ID NO. | IGF1R-17 | QVQLVESGGGVVQPGRSLRLSCAASGPSASAKAMAWFRQSVGK |
| 8855) | | EREGIAAIRHDGGETWYAASVKGRFTISRDNAKNTLYLQMNSL |
| | | RAEDTAVYYCVRDHGGARDIWGQGTLVTVSS |
| (SEQ ID NO. | IGF1R-37 | QVQLVESGGGVVQPGRSLRLSCAASGLSVSDSSMAWFRQRPGQ |
| 8856) | | EREGIAAIDTGDGSTYYLNSVEGRFTISHDNAKNTLYLQMNSL |
| | | RAEDTAVYYCVRQQRDGLVNFWGOGTLVTVSS |
| (SEQ ID NO. | INSULINR- | QVQLVESGGGVVQPGRSLRLSCAASGFTVGARAMAWYRQAPGK |
| 8857) | 87 | DREGVAAIDSDGIASYADSVKGRFTISRDNAKNTLYLQMNSLR |
| | | AEDTAVYYCARVSGSYGDYFDYWGQGTLVTVSS |
| (SEQ ID NO. | INSULINR- | QVQLVESGGGVVQPGRSLRLSCAASGYTEDESDMGWFRQAPGK |
| 8858) | 96 | GRELVSTISPDGTTYYADSVEGRETISRDNAKRMVYLQMNSLR |
| | | AEDTAVYYCARWRRSWFDTWGQGTLVTVSS |
| (SEQ ID NO. | LDLR-13 | QVQLVESGGGVVQPGRSLRLSCAASGYTVATYFIGWFRQAPGK |
| 8859) | | AREGVATITSDGRTKYADSVKGRFTISRDNAKNTVYLQMNSLR |
| | | AEDTAVYYCASRSIAAAGEGYWGQGTLVTVSS |
| (SEQ ID NO. | LRP1C2-46 | QVQLVESGGGVVQPGRSLRLSCAASGYPSCMGWARQAPGKGLE |
| 8860) | | WVACIERRGRIHYAASVKGRFTISRDNSKNTLYLQMNSLRAED |
| | | TAVYYCASODSSSYDAFDIWGQGTLVTVSS |
| (SEQ ID NO. | LRP1C3-24 | QVQLVESGGGVVQPGRSLRLSCAASGGAYRKYYMGWFROAPGK |
| 8861) | | GRELVAAIESDGTTDYADSVEGRETISRDNAKRMVYLQMNSLR |
| | | AEDTAVYYCASVIGGNSEDYWGOGTLVTVSS |
| (SEQ ID NO. | LRP1C4-33 | QVQLVESGGGVVQPGRSLRLSCAASGDANEFEWIGWYRQAPGK |
| 8862) | | GRELVARIGSSGPRYADSVEGRFTISRDNSKNTLYLQMNSLRA |
| | | EDTAVYYCAATHCSFLTTSVAGCTDDKYWGQGTLVTVSS |
| (SEQ ID NO. | SCARB1-3 | QVQLVESGGGVVQPGRSLRLSCAASGFTLGTNCMAWFRQAPGK |
| 8863) | | ERERVASIGSDGRTYYADSVKGRFTISRDNSKNTLYLQMNSLR |
| | | AEDTAVYYCARAPGIQLWKEDYWGQGTLVTVSS |
| (SEQ ID NO. | SCARBI- | QVQLVESGGGVVQPGRSLRLSCAASGFTNSKTYLGWVRRAPGK |
| 8864) | 49 | GLEWVAAIAPSTGSTYYDDSVKGRFTISRDNSKNTLYLQMNSL |
| | | RAEDTAVYYCASQGSSWYENDYWGQGTLVTVSS |
| (SEQ ID NO. | IGF1R-55 | QVQLVESGGGVVQPGRSLRLSCAASGFREDDYAMGWFRQAPGK |
| 8865) | | EREGVAGYKSDGSTTYADSVKGRFTISRDNSKNTLYLQMNSLR |
| | | AEDTAVYYCASRALYGGKPFVIWGQGTLVTVSS |
| (SEQ ID NO. | LRP1C4-31 | QVQLVESGGGVVQPGRSLRLSCAASGSPDRRACMGWYROAPGK |
| 8866) | | ERERVAEIDTDGNTSYADSVKGRFTISRDNSKNTVYLQMNSLR |
| | | AEDTAVYYCALQPGCPPATLFYWRKTGEGNWGQGTLVTVSS |
| (SEQ ID NO. | LRPIC4-80 | QVQLVESGGGVVQPGRSLRLSCAASGFTEDDTDMGWFRQAPGK |
| 8867) | | ERERVSTINSDGGTTYYADSVKGRFTISRDNSKNTLYLQMNSL |
| | | RAEDTAVYYCARARVTDAGWQYFDYWGOGTLVTVSS |
| (SEQ ID NO. | ALK1-15 | QVQLVESGGGVVQPGRSLRLSCAASGFTFSDYYIGWFRQAPGK |
| 8868) | | ERERVAQIDKNGVTNYADAVKGRFTISRDNSKNTLYLQMNSLR |
| | | AEDTAVYYCAGVDAFNYMEVWGQGTLVTVSS |
| (SEQ ID NO. | IGF1R-13 | QVQLVESGGGVVQPGRSLRLSCAASGDENDARAEWGWFRQAPG |
| 8869) | | KGRELVASLASDGSTIYANPVEGRFTISRDNAKNTLYLQMNSL |
| | | RAEDTAVYYCARSGASSSWYWFDYWGQGTLVTVSS |
| (SEQ ID NO. | IGF1R-96 | QVQLVESGGGVVQPGRSLRLSCAASGSIHNRRHMGWFRQAAGK |
| 8870) | | EREGVAAIDIAGNTRISDSVKGRFTISHDKDENRLYLQMNSLR |
| | | AEDTAVYYCAIQSSDGRGTVYWGOGTLVTVSS |
| (SEQ ID NO. | INSULINR- | QVQLVESGGGVVQPGRSLRLSCAASGRRGNNYSMAWYROAPGK |
| 8871) | 86 | DREGVAAIDSDGDTSYADPVKGRFTISRDNSKNTLYLQMNSLR |
| | | AEDTAVYYCAVATGEYRRYFDVWGQGTLVTVSS |
| (SEQ ID NO. | LRP1C3-93 | QVQLVESGGGVVQPGRSLRLSCAASGFAFTKYHMSWFRQAPGK |
| 8872) | | GRELVSHISAGGRTYYSDSVEGRETISRDNAKRMVYLQMNSLR |
| | | AEDTAVYYCVKESRPHSYGDHWGQGTLVTVSS |
| (SEQ ID NO. | TfR-1687 | QVQLVESGGGVVQPGRSLRLSCAASGVTFDEVDMGWARQAPGK |
| 8873) | | GLEWVSRIASDGRTYYTDSVKGRFTISRDNAKRMVYLQMNSLR |
| | | AEDTAVYYCTRRTIWGDAFDIWGQGTLVTVSS |
| (SEQ ID NO. | TfR-1704 | QVQLVESGGGVVQPGRSLRLSCAASGYSPAKYAMGWARQAPGK |
| 8874) | | GLEWVATIGRDGVAFYADSVKGRFTISRDNSKNIVYLQMNSLR |
| | | AEDTAVYYCAKGDYGDFQHYYLDYWGQGTLVTVSS |
| (SEQ ID NO. | TfR-1744 | QVQLVESGGGVVQPGRSLRLSCAASGFTFSNNWMHWFRQAPGK |
| 8875) | | GRELVAIVDDDGDPTYAPSVEGRFTISRDNSKNTLYLQMNSLR |
| | | AEDTAVYYCASSAGSYYYYGMDVWGQGTLVTVSS |
| (SEQ ID NO. | TfR-1715 | QVQLVESGGGVVQPGRSLRLSCAASGFTIRDSDMGWFRQAPGK |
| 8876) | | GRELVSTITSGGTTWYADSVEGRETISRDNAKRMVYLQMNSLR |
| | | AEDTAVYYCARSYNWNFYGMDVWGQGTLVTVSS |
| (SEQ ID NO. | TfR-1728 | QVQLVESGGGVVQPGRSLRLSCAASGFTFDDTDMGWFRQAPGK |
| 8877) | | ERERVSSISVDGNTWYSESVKGRFTISRDNSKNTVYLQMNSLR |
| | | AEDTAVYYCARGRMGSSWYWYFDLWGQGTLVTVSS |
| (SEQ ID NO. | TfR-1651 | QVQLVESGGGVVQPGRSLRLSCAASGIVEGSHDMGWARQAPGK |
| 8878) | | GLEWVATLTKAGQTLYTDTVKGRFTISADTSKNTAYLQMNSLR |
| | | AEDTAVYYCASDSRRDGWLDSWGOGTLVTVSS |
| (SEQ ID NO. | TfR1_6wrv | KKKYKITVTVPGKKEEEVIEVEEKDLTDVLTQKALEAAKKWGV |
| 8879) | 68_7_9 | KSGVKAEAEELE |
| (SEQ ID NO. | TfR-1409- | QVQLVESGGGVVQPGRSLRLSCAASGFSFSNFGMSWVRQARGK |
| 8880) | 51-105 | GLEWVSSIGSDGRAYYADSVKHRFTISRDNAKNTLYLQMNSLR |
| | | AEDTAVYYCARAPSRHGFDYWGQGTLVTVSS |
| (SEQ ID NO. | TfR-1409- | QVQLVESGGGVVQPGRSLRLSCAASGFSFSNFGMSWVRQARGK |
| 8881) | 51-G55I | GLEWVSSIGSDIRAYYADSVKGRFTISRDNAKNTLYLQMNSLR |
| | | AEDTAVYYCARAPSRHGFDYWGQGTLVTVSS |
| (SEQ ID NO. | TfR-1746 | QVQLVESGGGVVQPGRSLRLSCAASGFTFSNYAMTWERQAPGK |
| 8882) | | GRELVSAINGAGVTYYADSVEGRETISRDNAKRMVYLQMNSLR |
| | | AEDTAVYYCARASYYDFWSGYEDYYGMDVWGQGTLVTVSS |
| (SEQ ID NO. | TfR-1765 | QVQLVESGGGVVQPGRSLRLSCAASGFSFNDADMGWARQAPGK |
| 8883) | | GLEWVSTITADGSPYYSDSVKGRETISRDNSKNTLYLQMNSLR |
| | | AEDTAVYYCARAAGRSIGWFDPWGQGTLVTVSS |
| (SEQ ID NO. | TfR-1679 | QVQLVESGGGVVQPGRSLRLSCAASGAGYRPTTMGWFRQAPGK |
| 8884) | | ERERVAAISASGVSTNYADSVKGRFTISRDNSKNTLYLQMNSL |
| | | RAEDTAVYYCARAITPGGYFDSWGQGTLVTVSS |
| (SEQ ID NO. | TfR-7063 | QVQLVESGGGVVQPGRSLRLSCAASGFSFSNFGMSWVRQARGK |
| 8885) | | GLEWVSSIGSDGRAYYADSVEGRETISRDNAKNTLYLQMNSLR |
| | | AEDTAVYYCARAPSRHGFDYWGQGTLVTVSS |
| (SEQ ID NO. | TfR-1409- | QVQLVESGGGVVQPGRSLRLSCAASGFSFSNFGMSWVROARGK |
| 8886) | 51-A60M | GLEWVSSIGSDGRAYYMDSVKGRETISRDNAKNTLYLQMNSLR |
| | | AEDTAVYYCARAPSRHGFDYWGQGTLVTVSS |
| (SEQ ID NO. | CD98-62-10 | QVQLVESGGGVVQPGRSLRLSCAASGFTFSSYAMSWFRQALGK |
| 8887) | | DREGVAAIDSDGGTSYGESVKGRETISRDNSKNTVYLQMNSLR |
| | | AEDTAVYYCARAAPVGDDYYRMDYWGQGTLVTVSS |
| (SEQ ID NO. | CD98-7-2 | QVQLVESGGGVVQPGRSLRLSCAASGFTISGYSMHWFRQAPGK |
| 8888) | | GLEWVASIDTGGDRTYAPAVKGRFTISRDNSKNTLYLQMNSVR |
| | | AEDTAVYYCATDRNGGGAFDVWGQGTLVTVSS |
| (SEQ ID NO. | CD98-7-34 | QVQLVESGGGVVQPGRSLRLSCAASGFTISGYTMHWFRQAPGK |
| 8889) | | GLEWVASIDTGGDTTYSPSVKGRFTISRDNSSNTLYLQMNSLR |
| | | AEDTAVYYCATDRNGGGAFDVWGQGTLVTVSS |
| (SEQ ID NO. | CD98-7-6 | QVQLVESGGGVVQPGRSLRLSCAASGFTISGYTMHWFRQAPGK |
| 8890) | | GLEWVASDDTGGDTTYLPSVKRRFTISRDNSKNTLYLQMNSLR |
| | | AEDTAVYYCATDRNGGGAFDVWGOGTLVTVSS |
| (SEQ ID NO. | FLT1-49-11 | QVQLVESGGGVVQPGRSLRLSCAASGATSNTYGMGWFRLAPGK |
| 8891) | | EREGVASIYTODGRTAYADSVKGRFTISEDNAKNTVYLQMNSL |
| | | RAEDTAVYYCARIDIDGYAYWGQGTLVTVSS |
| (SEQ ID NO. | FLT1-49-31 | QVQLVESGGGVVQPGRSLRLSCAASGATSNTYYMGWFRLAPGK |
| 8892) | | EREGVASIYTODGRTAVADSVKGRFTISEDNAKNTVYLQMNSL |
| | | RAEDTAVYYCARIDIDGYAYWGQGTLVTVSS |
| (SEQ ID NO. | FLT1-49-51 | QVQLVESGGGVVQPGRSLRLSCAASGATSNTYYMGWFRLAPGK |
| 8893) | | EREGVASIYTODGRTAYIKSVKGRFTISEDNAKNTVYLQMNSL |
| | | RAEDTAVYYCARIDIDGYAYWGQGTLVTVSS |
| (SEQ ID NO. | FLT-1-49-41 | QVQLVESGGGVVQPGRSLRLSCAASGATSNTYYMGWFRLAPGK |
| 8894) | | EREGVASIYTODGRTAYADSVKGRFTISEDNAKNTVYLQMNSL |
| | | RAEDTAVYYCARHDIDGYVYWGQGTLVTVSS |

### IV. Production

i. Production of Barcodes

[0333] Disclosed herein are methods and systems for the production of barcodes for use in systems and methods of the present disclosure. In some embodiments, barcodes, as described herein, may be generated rapidly (e.g., in about a week, about 2 weeks, about 3 weeks, about 4 weeks, about 1 month, about 2 months, about 3 months, about 4 months, about 5 months, about 6 months, or about 1 year). In some embodiments, for example, between about 100 to about 1,000 barcodes may be generated rapidly. In some embodiments, between about 10 to about 1000 barcodes may be generated rapidly. In some embodiments, between about 10 to about 10,000 barcodes may be generated rapidly. While large numbers of barcodes, as described herein, may be generated rapidly, such barcodes are also robust, in that barcodes generated using the methods disclosed herein may bind specifically and with different affinities to a known set of binders.

[0334] In accordance with various embodiments, barcodes as described herein may be synthesized using a nucleic acid (e.g., oligonucleotide) array. In some embodiments, barcodes as described herein may be synthesized using a DNA array. In some embodiments, nucleic acids (e.g., oligonucleotides) of a nucleic acid array are expressed into barcodes. In some embodiments, barcodes as described herein may be synthesized using nucleic acid library. In some embodiments, a nucleic acid library is synthesized using a nucleic acid array. In some embodiments, nucleic acids (e.g., oligonucleotides) of a nucleic acid library are expressed into barcodes.

[0335] In some embodiments, a barcode nucleic acid library comprises about 1 or more, about 2 or more, about 3 or more, about 4 or more, about 5 or more, about 10 or more, about 50 or more, about 100 or more, about 200 or more, about 300 or more, about 400 or more, about 500 or more, about 600 or more, about 700 or more, about 800 or more, about 900 or more, about 1000 or more, about 2000 or more, about 3000 or more, about 4000 or more, or about 5000 or more potential barcodes. In some embodiments, a nucleic acid library comprises one or more potential barcode sequences. Such potential barcode sequences may be screened for functionality as peptide barcodes (i.e., after translation of potential barcode nucleic acid sequences) using one or more methods described herein.

[0336] Barcodes of the present disclosure may be screened for one or more specific properties. In some embodiments, a barcode may be screened for specific binding (e.g., specificity, binding affinity) to a binder. In some embodiments, a barcode may be screened for specific binding to one or more binders. In some embodiments, a barcode may be screened for specific binding to at least a binder. In some embodiments, a barcode may be screened for specific binding to at most a binder. In some embodiments, a barcode may be screened for specific binding to multiple binders.

[0337] As may be understood by a person of ordinary skill in the art, a barcode is designed to be distinct (i.e., unique (e.g., have a unique sequence)) in a pool of barcodes. Such distinction may be achieved, in some embodiments, by changing one or more amino acids in a barcode. In some embodiments, a barcode is distinct from other barcodes in a pool of barcodes by 1 amino acid. In some embodiments, a barcode is distinct from other barcodes in a pool of barcodes by at least 1 amino acid. In some embodiments, a barcode is distinct from other barcodes in a pool of barcodes by at most 1 amino acid. In some embodiments, a barcode is distinct from other barcodes in a pool of barcodes by 2, 3, 4, 5, 6, 7, 8, 9, 10, 11, 12, 13, 14, 15, 16, 17, 18, 19, 20, 21, 22, 23, 24, or 25 amino acids. In some embodiments, a barcode is distinct from other barcodes in a pool of barcodes by at least 2 amino acids. In some embodiments, a barcode is distinct from other barcodes in a pool of barcodes by at most 50 amino acids.

ii. Production of Barcoded Cargos

[0338] Barcoded cargos in accordance with the present invention may be produced in various ways. In some embodiments, cargo-barcode nucleic acid sequence pairs may be inserted into a plasmid to allow for expression in different expression systems (e.g., protein expression systems). In some embodiments, at least one cargo-barcode nucleic acid sequence pair is inserted into a plasmid. In some embodiments, at least two cargo-barcode nucleic acid sequence pairs are inserted into a plasmid. In some embodiments, at least three cargo-barcode nucleic acid sequence pairs are inserted into a plasmid. In some embodiments, one or more cargo-barcode nucleic acid sequence pairs are inserted into a plasmid.

[0339] In some embodiments, a cargo-barcode nucleic acid sequence may comprise additional sequences. In some embodiments, a cargo-barcode nucleic acid sequence may comprise additional nucleic acid sequences. In some embodiments, a cargo-barcode nucleic acid sequence may comprise a universal motif sequence. In some embodiments, a cargo-barcode nucleic acid sequence may comprise at least one universal motif sequence. In some embodiments, a cargo-barcode nucleic acid sequence may comprise at least two universal motif sequences. In some embodiments, a cargo-barcode nucleic acid sequence may comprise two or more universal motif sequences.

[0340] In some embodiments, at least one cargo-barcode nucleic acid sequences in a pool of cargo-barcode nucleic acid sequences may comprise a universal motif sequence. In some embodiments, all cargo-barcode nucleic acid sequences in a pool of cargo-barcode nucleic acid sequences may comprise a universal motif sequence.

[0341] Different plasmids may be used to produce technologies described herein. In some embodiments, a plasmid is a DNA plasmid. In some embodiments, a plasmid is an RNA plasmid. In some embodiments, a plasmid is a fertility F-plasmid. In some embodiments, a plasmid is a resistance plasmid. In some embodiments, a plasmid is a virulence plasmid. In some embodiments, a plasmid is a degradative plasmid. In some embodiments, a plasmid is a Col plasmid.

[0342] Different hosts (e.g., host cell, host cell line, etc.) may be used to produce technologies described herein. In some embodiments, a host is a mammalian host. In some embodiments, a host is a non-mammalian host. In some embodiments, a host is an insect. In some embodiments, a host is a bacteria. In some embodiments, a host is E. coli.

[0343] In some embodiments, a cargo-barcode pair is expressed in vitro. In some embodiments, a cargo-barcode pair is expressed in vivo. In some embodiments, a cargo-barcode pair is expressed from RNA. In some embodiments, a cargo-barcode pair is expressed from transcribed RNA. In some embodiments, a cargo-barcode pair is expressed from DNA. In some embodiments, a cargo-barcode pair is expressed using protein components (e.g., required for protein translation).

[0344] After expression of barcoded cargo constructs, constructs may be purified from the pool. In some embodiments, purification may be performed using a universal motif. In some embodiments, purification may be performed using HIS tag, FLAG tag, HALO tag, SNAP tag, Avitag, Twin strep tag, or any other tag based method of protein purification known in the art.

iii. Production of Binders

[0345] Disclosed herein are methods and systems for the production of binders for use in systems and methods of the present disclosure. In some embodiments, binders, as described herein, may be generated rapidly (e.g., in about a week, about 2 weeks, about 3 weeks, about 4 weeks, about 1 month, about 2 months, about 3 months, about 4 months, about 5 months, about 6 months, or about 1 year). In some embodiments, for example, between about 100 to about 1000 binders may be generated rapidly. In some embodiments, between about 10 to about 1000 binders may be generated rapidly. In some embodiments, between about 10 to about 10,000 binders may be generated rapidly. While large numbers of binders, as described herein, may be generated rapidly, such binders are also robust, in that binders generated using the methods disclosed herein may bind specifically and with different affinities to a known set of barcodes.

[0346] In some embodiments, a binder nucleic acid library comprises about 1 or more, about 2 or more, about 3 or more, about 4 or more, about 5 or more, about 10 or more, about 50 or more, about 100 or more, about 200 or more, about 300 or more, about 400 or more, about 500 or more, about 600 or more, about 700 or more, about 800 or more, about 900 or more, about 1000 or more, about 2000 or more, about 3000 or more, about 4000 or more, or about 5000 or more potential binders. In some embodiments, a nucleic acid library comprises one or more potential binder sequences. Such potential binder sequences may be screened for functionality as polypeptide binders (i.e., after translation of potential nucleic acid binder sequences) using one or more methods described herein.

[0347] Binders in accordance with the present invention may be produced in various ways. In some embodiments, a binder nucleic acid sequence may be inserted into a plasmid to allow for expression in different expression systems. In some embodiments, at least one binder nucleic acid sequence is inserted into a plasmid. In some embodiments, at least two binder nucleic acid sequences are inserted into a plasmid. In some embodiments, at least three binder nucleic acid sequences are inserted into a plasmid. In some embodiments, one or more binder nucleic acid sequences are inserted into a plasmid.

[0348] In some embodiments, a binder nucleic acid sequence is attached to one or more genes. In some embodiments, a binder nucleic acid sequence is attached to one or more genes prior to insertion into a plasmid. In some embodiments, a binder nucleic acid sequence is attached to one or more genes after insertion into a plasmid. In some embodiments, a binder nucleic acid sequence is attached to a bacteriophage gene. In some embodiments, a binder nucleic acid sequence is attached to an m13 bacteriophage gene. In some embodiments, a binder nucleic acid sequence is attached to gene 3 (i.e., that encodes for gene 3 protein) of m13 bacteriophage.

[0349] In some embodiments, plasmids (e.g., containing binder sequences, containing binder and bacteriophage sequences, etc.) may be transformed into a host. In some embodiments, plasmids may be transformed into a host and expressed. In some embodiments, plasmids are transformed into a bacterium. In some embodiments, plasmids are transformed into f. coli.

[0350] In some embodiments, expression of plasmids results in phage production. In some embodiments, expression of plasmids results in display of a binder on a surface of a phage. In some embodiments, expression of plasmids results in display of two binders on a surface of a phage. In some embodiments, expression of plasmids results in display of at least one binder on a surface of a phage. In some embodiments, expression of plasmids results in display of one or more binders on a surface of a phage. In some embodiments, expression of plasmids results in display of one or more binders on one or more surfaces of a phage. In some embodiments, expression of plasmids results in display of at least one binder on one or more surfaces of a phage.

[0351] Following phage production, the resulting pool may be purified to determine the presence of one or more polypeptide binders. In some embodiments, purification may be performed using a universal motif. In some embodiments, purification may be performed using HIS tag, FLAG tag, HALO tag, SNAP tag, Avitag, Twin strep tag, or any other tag based method of protein purification known in the art.

[0352] In some embodiments, a purified binder pool may be highly diverse. In some embodiments, a purified binder pool may not be highly diverse. In some embodiments, a purified binder pool is subjected to screening methods to select binders of interest.

[0353] Binders of the present disclosure may be screened for one or more specific properties. In some embodiments, a binder may be screened for specific binding to a barcode. In some embodiments, a binder may be screened for specific binding to one or more barcodes. In some embodiments, a binder may be screened for specific binding to at least a barcode. In some embodiments, a binder may be screened for specific binding to at most a barcode. In some embodiments, a binder may be screened for specific binding to multiple barcodes.

[0354] As may be understood by a person of ordinary skill in the art, a binder is designed to be distinct (i.e., unique (e.g., have a unique sequence)) in a pool of binders. Such distinction may be achieved, in some embodiments, by changing one or more amino acids in a binder. In some embodiments, a binder is distinct from other binders in a pool of binders by 1 amino acid. In some embodiments, a binder is distinct from other binder in a pool of binders by at least 1 amino acid. In some embodiments, a binder is distinct from other binder in a pool of binders by at most 1 amino acid. In some embodiments, a binder is distinct from other binder in a pool of binders by 2, 3, 4, 5, 6, 7, 8, 9, 10, 11, 12, 13, 14, 15, 16, 17, 18, 19, 20, 21, 22, 23, 24, or 25 amino acids. In some embodiments, a binder is distinct from other binder in a pool of binders by at least 2 amino acids. In some embodiments, a binder is distinct from other binder in a pool of binders by at most 1000 amino acids.

iv. Production of Shuttles

[0355] Disclosed herein are methods and systems for the production of shuttles for use in systems and methods of the present disclosure. In some embodiments, shuttles, as described herein, may be generated rapidly (e.g., in about a week, about 2 weeks, about 3 weeks, about 4 weeks, about 1 month, about 2 months, about 3 months, about 4 months, about 5 months, about 6 months, or about 1 year). In some embodiments, for example, between about 100 to about 1,000 shuttles may be generated rapidly. In some embodiments, between about 10 to about 1000 shuttles may be generated rapidly. In some embodiments, between about 10 to about 10,000 shuttles may be generated rapidly. While large numbers of shuttles, as described herein, may be generated rapidly, such shuttles are also robust, in that shuttles generated using the methods disclosed herein may bind specifically and with different affinities to different targets.

[0356] In accordance with various embodiments, shuttles as described herein may be synthesized using a nucleic acid (e.g., oligonucleotide) array. In some embodiments, shuttles as described herein may be synthesized using a DNA array. In some embodiments, nucleic acids (e.g., oligonucleotides) of a nucleic acid array are expressed into shuttles. In some embodiments, shuttles as described herein may be synthesized using nucleic acid library. In some embodiments, a nucleic acid library is synthesized using a nucleic acid array. In some embodiments, nucleic acids (e.g., oligonucleotides) of a nucleic acid library are expressed into shuttles.

[0357] In some embodiments, a shuttle nucleic acid library comprises about 1 or more, about 2 or more, about 3 or more, about 4 or more, about 5 or more, about 10 or more, about 50 or more, about 100 or more, about 200 or more, about 300 or more, about 400 or more, about 500 or more, about 600 or more, about 700 or more, about 800 or more, about 900 or more, about 1000 or more, about 2000 or more, about 3000 or more, about 4000 or more, or about 5000 or more potential shuttles. In some embodiments, a nucleic acid library comprises one or more potential shuttle sequences. Such potential shuttle sequences may be screened for functionality as peptide shuttles (i.e., after translation of potential shuttle nucleic acid sequences) using one or more methods described herein.

[0358] Shuttles of the present disclosure may be screened for one or more specific properties. In some embodiments a shuttle may be screened for delivery to a specific cell, tissue, or organ of interest (e.g., targeted delivery). In some embodiments a shuttle may be screened for delivery to one or more specific cells, tissues, or organs of interest. In some embodiments a shuttle may be screened for delivery to at least a specific cell, tissue, or organ of interest. In some embodiments a shuttle may be screened for delivery to at most a specific cell, tissue, or organ of interest. In some embodiments a shuttle may be screened for delivery to more than one (e.g., multiple) specific cell, tissue, or organ of interest.

[0359] In some embodiments, a shuttle may be screened for specific binding (e.g., specificity, binding affinity) to a target. In some embodiments, a shuttle may be screened for specific binding to one or more targets. In some embodiments, a shuttle may be screened for specific binding to at least a target. In some embodiments, a shuttle may be screened for specific binding to at most a target. In some embodiments, a shuttle may be screened for specific binding to multiple targets.

[0360] As may be understood by a person of ordinary skill in the art, a shuttle is designed to be distinct (i.e., unique (e.g., have a unique sequence)) in a pool of shuttles. Such distinction may be achieved, in some embodiments, by changing one or more amino acids in a shuttle. In some embodiments, a shuttle is distinct from other shuttles in a pool of shuttles by 1 amino acid. In some embodiments, a shuttle is distinct from other shuttles in a pool of shuttles by at least 1 amino acid. In some embodiments, a shuttle is distinct from other shuttles in a pool of shuttles by at most 1 amino acid. In some embodiments, a shuttle is distinct from other shuttles in a pool of shuttles by 2, 3, 4, 5, 6, 7, 8, 9, 10, 11, 12, 13, 14, 15, 16, 17, 18, 19, 20, 21, 22, 23, 24, or 25 amino acids. In some embodiments, a shuttle is distinct from other shuttles in a pool of shuttles by at least 2 amino acids. In some embodiments, a shuttle is distinct from other shuttles in a pool of shuttles by at most 50 amino acids. In some embodiments, a shuttle is distinct from other shuttles in a pool of shuttles by at most 100 amino acids. In some embodiments, a shuttle is distinct from other shuttles in a pool of shuttles by at most 150 amino acids.

v. Production of Shuttle-Cargos

[0361] The present disclosure contemplates that in some embodiments, a cargo as described herein is operably linked to a shuttle (e.g., a shuttle moiety (e.g., a peptide shuttle)) as described herein. In some embodiments, a cargo is operably linked to a shuttle to form shuttle-cargos.

[0362] Shuttle-cargos in accordance with the present invention may be produced in various ways. In some embodiments, shuttle-cargo nucleic acid sequence pairs may be inserted into a plasmid to allow for expression in different expression systems (e.g., protein expression systems). In some embodiments, at least one shuttle-cargo nucleic acid sequence pair is inserted into a plasmid. In some embodiments, at least two shuttle-cargo nucleic acid sequence pairs are inserted into a plasmid. In some embodiments, at least three shuttle-cargo nucleic acid sequence pairs are inserted into a plasmid. In some embodiments, one or more shuttle-cargo nucleic acid sequence pairs are inserted into a plasmid.

[0363] In some embodiments, a shuttle-cargo nucleic acid sequence may comprise additional sequences. In some embodiments, a shuttle-cargo nucleic acid sequence may comprise additional nucleic acid sequences. In some embodiments, a shuttle-cargo nucleic acid sequence may comprise a universal motif sequence. In some embodiments, a shuttle-cargo nucleic acid sequence may comprise at least one universal motif sequence. In some embodiments, a shuttle-cargo nucleic acid sequence may comprise at least two universal motif sequences. In some embodiments, a shuttle-cargo nucleic acid sequence may comprise two or more universal motif sequences.

[0364] In some embodiments, at least one shuttle-cargo nucleic acid sequence in a pool of shuttle-cargo nucleic acid sequences may comprise a universal motif sequence. In some embodiments, all shuttle-cargo nucleic acid sequences in a pool of shuttle-cargo nucleic acid sequences may comprise a universal motif sequence.

[0365] Different plasmids may be used to produce technologies described herein. In some embodiments, a plasmid is a DNA plasmid. In some embodiments, a plasmid is an RNA plasmid. In some embodiments, a plasmid is a fertility F-plasmid. In some embodiments, a plasmid is a resistance plasmid. In some embodiments, a plasmid is a virulence plasmid. In some embodiments, a plasmid is a degradative plasmid. In some embodiments, a plasmid is a Col plasmid.

[0366] Different hosts (e.g., host cell, host cell line, etc.) may be used to produce technologies described herein. In some embodiments, a host is a mammalian host. In some embodiments, a host is a non-mammalian host. In some embodiments, a host is an insect. In some embodiments, a host is a bacteria. In some embodiments, a host is E. coli.

[0367] In some embodiments, a shuttle-cargo pair is expressed in vitro. In some embodiments, a shuttle-cargo pair is expressed in vivo. In some embodiments, a shuttle-cargo pair is expressed from RNA. In some embodiments, a shuttle-cargo pair is expressed from transcribed RNA. In some embodiments, a shuttle-cargo pair is expressed from DNA. In some embodiments, a shuttle-cargo pair is expressed using protein components (e.g., required for protein translation).

[0368] After expression of shuttle-cargo constructs, constructs may be purified from the pool. In some embodiments, purification may be performed using a universal motif. In some embodiments, purification may be performed using HIS tag, FLAG tag, HALO tag, SNAP tag, Avitag, Twin strep tag, or any other tag based method of protein purification known in the art.

[0369] The present disclosure appreciates that in some embodiments a cargo is or comprises a therapeutic agent. For example, in some embodiments, a cargo is or comprises an antibody. In some embodiments, a cargo is or comprises one or more components of an antibody (e.g., one or more variable light (VL) chains, variable heavy (VH) chains, and/or complementarity- determining regions (CDRs) of an antibody). In some embodiments, a cargo is or comprises an antibody drug conjugate (ADC). In some embodiments, a cargo is or comprises an oligonucleotide. In some embodiments, a cargo is or comprises an antibody associated with (e.g., covalently, non-covalently) an oligonucleotide.

[0370] Shuttles (e.g., a peptide shuttle) as disclosed herein may be associated (e.g., covalently, non-covalently) with a cargo as described herein (e.g., a cargo polypeptide) through various methods. Shuttles (e.g., a peptide shuttle) as disclosed herein may be associated with a therapeutic agent as described herein (e.g., a therapeutic polypeptide) through various methods. In some embodiments, for example, methods by which shuttles as described herein may be associated with (i) cargos as described herein, or (ii) therapeutic agents as described herein include, but are not limited to, recombinant fusion, click chemistry, sortase-based methods, transglutaminase-based methods, lysine/NHS conjugation, and cysteine/maleimide conjugation. As may be apparent to those of ordinary skill in the art reading the specification, many other methods may be used to associate shuttles with cargos and/or shuttles with therapeutic agents.

### V. Characterization

i. Samples

[0371] As described elsewhere in the present disclosure, a sample may be a biological sample. In some embodiments, a sample may contain one or more barcoded cargos. In some embodiments, a sample may contain one or more barcoded shuttle-cargos. In some embodiments, a sample may contain one or more barcoded cargo polypeptides. In some embodiments, a sample may contain one or more barcoded shuttle-cargo polypeptides.

[0372] In some embodiments, a sample is derived from an organism. In some embodiments, a sample is derived from an animal. In some embodiments, a sample is derived from an animal model of disease. In some embodiments, a sample is derived from a non-mammal. In some embodiments, a sample is derived from a mammal (e.g., a rodent, a mouse, a rat, a rabbit, a monkey, a dog, a cat, a sheep, cattle, a primate, and/or a pig). In some embodiments, a sample is derived from a mouse. In some embodiments, a sample is derived from a human. In some embodiments, a sample is derived from cells (e.g., in vitro). In some embodiments, a sample is a human cell line.

[0373] In some embodiments, a sample may be purified. In some embodiments, a sample may not be purified.

[0374] In some embodiments, a sample is obtained from cells that was treated with barcoded cargos. In some embodiments, a sample is obtained from cells that was not treated with barcoded cargos. In some embodiments, a sample is obtained from an animal that was treated with barcoded cargos. In some embodiments, a sample is obtained from an animal that was not treated with barcoded cargos. For example, in some embodiments, a sample is obtained from a human that was treated with barcoded cargo polypeptides (e.g., barcoded shuttle-cargo polypeptides).

[0375] In some embodiments, a sample is obtained from cells that was genetically modified. In some embodiments, a sample is obtained from cells that was modified by gene therapy. In some embodiments, a sample is obtained from cells that was genetically modified to include one or more barcoded cargos. In some embodiments, a sample is obtained from cells that was genetically modified to express a barcoded cargos. In some embodiments, a sample is obtained from cells that was genetically modified to include one or more barcodes. In some embodiments, a sample is obtained from cells that was genetically modified to express a barcodes. In some embodiments, a sample is obtained from cells that was genetically modified to include one or more binders. In some embodiments, a sample is obtained from cells that was genetically modified to express a binders.

[0376] In some embodiments, a sample is obtained from an animal that was genetically modified. In some embodiments, a sample is obtained from an animal that was modified by gene therapy. In some embodiments, a sample is obtained from an animal that was genetically modified to include one or more barcoded cargos. In some embodiments, a sample is obtained from an animal that was genetically modified to express a barcoded cargos. In some embodiments, a sample is obtained from an animal that was genetically modified to include one or more barcodes. In some embodiments, a sample is obtained from an animal that was genetically modified to express a barcodes. In some embodiments, a sample is obtained from an animal that was genetically modified to include one or more binders. In some embodiments, a sample is obtained from an animal that was genetically modified to express a binders.

ii. Fingerprints

[0377] Among other things, systems and methods described herein identify the advantages of nucleic acid sequencing techniques and apply them effectively to protein detection and measurement methods. For example, methods described herein may use several binders, with known binding specificities and affinities to different barcodes, that can be expressed on binding agents and mixed together in a single pool. Upon mixing with a pool of barcoded cargo polypeptides (i.e., proteins, each associated with a barcode as described herein (e.g., barcoded shuttle-cargo polypeptides)), each binder expressed on a binding agent binds to a one or more barcodes in the pool with known but varying affinities. Such a spectrum of affinities for a given barcode to one or more binders results in a distinct distribution of binder counts for a given barcode that can be determined through NGS, and is termed herein a ‘Barcode Fingerprint’. In some embodiments, the collective barcode fingerprints for a set of barcodes is termed herein a ‘Fingerprint Matrix’. Analogously, a spectrum of affinities of a binder to various (e.g., one or more) barcodes is termed herein as a ‘Binder Fingerprint’. In some embodiments, using the provided technologies the presence of a barcoded cargo polypeptide(s) or a barcoded shuttle-cargo polypeptide(s) can be detected, for example, in a complex solution, by extracting and sequencing the associated nucleic acid (e.g., detectable nucleic acid (e.g., DNA sequence, RNA sequence, etc.)) of the population of binding agents (e.g., phage) that bind to the barcoded cargo polypeptide(s) or a barcoded shuttle-cargo polypeptide(s). That is, for example, in some embodiments, the presence of a protein in a complex solution is determined not through a single binder, but through a specific combination of multiple binders that bind to a barcode associated with said protein in fixed, known proportions.

[0378] Fingerprints, as disclosed herein, have many advantages. In some embodiments, a fingerprint approach of detection allows for reduction of noise. For example, the use of multiple binders to detect a barcode in a complex solution introduces a redundancy into the detection methods that in turn reduces signal noise. Additionally, another advantage of the “fingerprint” approach is that partial non-specificities in the binders (e.g., to barcodes other than the barcode of interest to be detected) can be tolerated and compensated for by the computational prediction methods.

[0379] In some embodiments, binder sequences may be modified in order to change a fingerprint. In some embodiments, binder sequences may be modified in order to improve a fingerprint.

[0380] A barcode fingerprint, as described herein, for a given barcode may include affinity information of a given barcode to one or more binders. In some embodiments, a barcode fingerprint may include affinity information of a given barcode to one binder. In some embodiments, a barcode fingerprint may include affinity information of a given barcode to at least one binder. In some embodiments, a barcode fingerprint may include affinity information of a given barcode to 2, 3, 4, 5, 10, 20, 25, 50, 100, 200, 300, 400, 500, 600, 700, 800, 900, 1000, 2000, 3000, 4000, 5000, 6000, 7000, 8000, 9000, or 10,000 or more binders. In some embodiments, a barcode fingerprint may include affinity information of a given barcode to at most 10,000 binders.

[0381] A binder fingerprint, as described herein, for a given binder may include affinity information of a given binder to one or more barcodes. In some embodiments, a binder fingerprint may include affinity information of a given binder to one barcode. In some embodiments, a binder fingerprint may include affinity information of a given binder to at least one barcode. In some embodiments, a binder fingerprint may include affinity information of a given binder to 2, 3, 4, 5, 10, 20, 25, 50, 100, 200, 300, 400, 500, 600, 700, 800, 900, 1000, 2000, 3000, 4000, 5000, 6000, 7000, 8000, 9000, or 10,000 or more barcodes. In some embodiments, a binder fingerprint may include affinity information of a given binder to at most 10,000 barcodes.

[0382] As discussed herein, in some embodiments, multiple barcode fingerprints for a set of barcodes may be grouped together and is termed herein a ‘Fingerprint Matrix’. In some embodiments, a fingerprint matrix may comprise one barcode fingerprint. In some embodiments, a fingerprint matrix may comprise at least one barcode fingerprint. In some embodiments, a fingerprint matrix may comprise 2, 3, 4, 5, 10, 20, 25, 50, 100, 200, 300, 400, 500, 600, 700, 800, 900, 1000, 2000, 3000, 4000, 5000, 6000, 7000, 8000, 9000, or 10,000 or more barcode fingerprints. In some embodiments, a fingerprint matrix may comprise at most 10,000 barcode fingerprints.

[0383] The technologies described herein allow for the generation and characterization of unique fingerprints for each barcode. This allows, for example, availability of methods of cargo (i.e., target (e.g., protein)) detection that may not require orthogonality between barcode-binder pairs. In some embodiments, barcode-binder pairs may be orthogonal. In some embodiments, barcode-binder pairs may not be orthogonal. As may be evident to a person of ordinary skill in the art, barcode-binder pairs as described herein provide the advantage of being more robust, as the availability of unique fingerprints makes non-specific binding less of a concern, a major advantage in complex environments (e.g., serum, blood, etc.).

iii. Decoding

### Analysis

[0384] A key component of the invention is the method used to deduce relative or absolute protein concentrations from the DNA sequencing of binders. In the invention, the DNA sequences are translated in silico into amino acid sequences corresponding to each binder and tabulated to yield a table of binder counts. The binder count table measured for any given barcode in isolation is henceforth known as a “fingerprint” of a barcode. When applying the invention to an unknown mixture of barcoded cargos, the relative or absolute abundance of individual barcodes is determined by comparing the binder count table to the predetermined fingerprints of the individual barcodes and applying a computational prediction method described below. In some embodiments, the binder count table of a mixture of m unknown barcodes is assumed to be a linear combination of their respective fingerprints; the coefficients of the linear combination are inferred through least-squares fitting of the equation A x=b, where A is an n-by-m matrix of fingerprints, b is a length-n vector of binder counts, and x is an undetermined length-m vector of the abundances of each of the barcodes. In some embodiments, the abundances of each of the barcodes is inferred using a Bayesian method, whereby a suitable prior probability distribution over the barcode abundances is assumed, a likelihood ratio of the observed count table given barcode abundances is calculated from a model of the uncertainties in the experimental system, and a posterior probability distribution is inferred the product of the prior with the likelihood ratio. In some embodiments, the posterior distribution is estimated using Monte Carlo sampling methods. In some embodiments, the maximum of the posterior distribution is determined with a computational optimization procedure. In some embodiments, the binder count table is assumed to be a non-linear function of the abundances of various barcodes to account for saturation of particular barcode-binder interactions or competition between distinct barcodes or distinct binders.

[0385] In some embodiments, relative proportions of binder counts are compared directly in order to determine relative proportions of barcodes. In some embodiments, sequences of known abundance are mixed into the experiment, and utilized to determine the absolute abundance of a given binder, which is used to estimate an absolute concentration for a barcode.

### VI. Nucleic Acids

i. Cargo Nucleic Acid

[0386] Among other things, the present disclosure provides nucleic acids, e.g., that can be disposed within a delivery particle as described herein. Nucleic acids according to the present disclosure include all those known in the art, including cosmids, plasmids (e.g., naked or contained in liposomes) and viral constructs (e.g., lentiviral, retroviral, adenoviral, and adeno-associated viral constructs) that incorporate a nucleic acid encoding a cargo polypeptide, or characteristic portion thereof. Those of skill in the art will be capable of selecting suitable constructs, as well as cells, for making any of the polynucleotides described herein. In some embodiments, a nucleic acid is a plasmid (i.e., a circular DNA molecule that can autonomously replicate inside a cell). In some embodiments, a nucleic acid can be a cosmid (e.g., pWE or sCos series).

[0387] In some embodiments, a cargo nucleic acid (e.g., a cargo component) is or comprises a wild-type (e.g., naturally occurring) nucleic acid. In some embodiments, a cargo nucleic acid (e.g., a cargo component) is or comprises a variant nucleic acid (e.g., a variant cargo nucleic acid). In some embodiments, a variant nucleic acid is a variant of a reference nucleic acid, which reference nucleic acid is or comprises a wild-type (e.g., naturally occurring) nucleic acid (e.g., a nucleic acid encoding a wild-type polypeptide). In some embodiments, a variant nucleic acid is or comprises at least one mutation relative to a reference nucleic acid (e.g., a wild-type nucleic acid (e.g., a nucleic acid encoding a wild-type polypeptide)).

[0388] In some embodiments, a variant cargo nucleic acid (e.g., a variant cargo component) is associated with (e.g., operably linked to) a barcode, as described herein (i.e., a barcoded variant cargo nucleic acid). In some embodiments, a variant cargo nucleic acid possesses improved functionality (e.g., reduced toxicity (e.g., reduced anemia), improved pharmacokinetic measures (e.g., dissociation constant (Kd), improved biophysical properties, improved developability, improved expression, etc.) relative to a reference nucleic acid (e.g., a wild-type nucleic acid (e.g., a nucleic acid encoding a wild-type polypeptide)).

### 1. Viral Nucleic Acid

[0389] In some embodiments, a nucleic acid is a viral construct. In some embodiments, a viral construct is a lentivirus, retrovirus, adenovirus, or adeno-associated virus construct. In some embodiments, a nucleic acid is an adeno-associated virus (AAV) construct (see, e.g., Asokan et al., Mol. Ther. 20: 699-7080, 2012, which is incorporated in its entirety herein by reference). In some embodiments, a viral construct is an adenovirus construct. In some embodiments, a viral construct may also be based on or derived from an alphavirus. Alphaviruses include Sindbis (and VEEV) virus, Aura virus, Babanki virus, Barmah Forest virus, Bebaru virus, Cabassou virus, Chikungunya virus, Eastern equine encephalitis virus, Everglades virus, Fort Morgan virus, Getah virus, Highlands J virus, Kyzylagach virus, Mayaro virus, Me Tri virus, Middelburg virus, Mosso das Pedras virus, Mucambo virus, Ndumu virus, O'nyong-nyong virus, Pixuna virus, Rio Negro virus, Ross River virus, Salmon pancreas disease virus, Semliki Forest virus, Southern elephant seal virus, Tonate virus, Trocara virus, Una virus, Venezuelan equine encephalitis virus, Western equine encephalitis virus, and Whataroa virus. Generally, the genome of such viruses encode nonstructural (e.g., replicon) and structural proteins (e.g., capsid and envelope) that can be translated in the cytoplasm of the host cell. Ross River virus, Sindbis virus, Semliki Forest virus (SFV), and Venezuelan equine encephalitis virus (VEEV) have all been used to develop viral constructs for coding sequence delivery. Pseudotyped viruses may be formed by combining alphaviral envelope glycoproteins and retroviral capsids. Examples of alphaviral constructs can be found in U.S. Publication Nos. 20150050243, 20090305344, and 20060177819; constructs and methods of their making are incorporated herein by reference to each of the publications in its entirety.

[0390] In some embodiments, a nucleic acid is a viral construct and can have a total number of nucleotides of up to 10 kb. In some embodiments, a viral construct can have a total number of nucleotides in the range of about 1 kb to about 2 kb, 1 kb to about 3 kb, about 1 kb to about 4 kb, about 1 kb to about 5 kb, about 1 kb to about 6 kb, about 1 kb to about 7 kb, about 1 kb to about 8 kb, about 1 kb to about 9 kb, about 1 kb to about 10 kb, about 2 kb to about 3 kb, about 2 kb to about 4 kb, about 2 kb to about 5 kb, about 2 kb to about 6 kb, about 2 kb to about 7 kb, about 2 kb to about 8 kb, about 2 kb to about 9 kb, about 2 kb to about 10 kb, about 3 kb to about 4 kb, about 3 kb to about 5 kb, about 3 kb to about 6 kb, about 3 kb to about 7 kb, about 3 kb to about 8 kb, about 3 kb to about 9 kb, about 3 kb to about 10 kb, about 4 kb to about 5 kb, about 4 kb to about 6 kb, about 4 kb to about 7 kb, about 4 kb to about 8 kb, about 4 kb to about 9 kb, about 4 kb to about 10 kb, about 5 kb to about 6 kb, about 5 kb to about 7 kb, about 5 kb to about 8 kb, about 5 kb to about 9 kb, about 5 kb to about 10 kb, about 6 kb to about 7 kb, about 6 kb to about 8 kb, about 6 kb to about 9 kb, about 6 kb to about 10 kb, about 7 kb to about 8 kb, about 7 kb to about 9 kb, about 7 kb to about 10 kb, about 8 kb to about 9 kb, about 8 kb to about 10 kb, or about 9 kb to about 10 kb.

[0391] In some embodiments, a nucleic acid is a lentivirus construct and can have a total number of nucleotides of up to 8 kb. In some examples, a lentivirus construct can have a total number of nucleotides of about 1 kb to about 2 kb, about 1 kb to about 3 kb, about 1 kb to about 4 kb, about 1 kb to about 5 kb, about 1 kb to about 6 kb, about 1 kb to about 7 kb, about 1 kb to about 8 kb, about 2 kb to about 3 kb, about 2 kb to about 4 kb, about 2 kb to about 5 kb, about 2 kb to about 6 kb, about 2 kb to about 7 kb, about 2 kb to about 8 kb, about 3 kb to about 4 kb, about 3 kb to about 5 kb, about 3 kb to about 6 kb, about 3 kb to about 7 kb, about 3 kb to about 8 kb, about 4 kb to about 5 kb, about 4 kb to about 6 kb, about 4 kb to about 7 kb, about 4 kb to about 8 kb, about 5 kb to about 6 kb, about 5 kb to about 7 kb, about 5 kb to about 8 kb, about 6 kb to about 8 kb, about 6 kb to about 7 kb, or about 7 kb to about 8 kb

[0392] In some embodiments, a nucleic acid is an adenovirus construct and can have a total number of nucleotides of up to 8 kb. In some embodiments, an adenovirus construct can have a total number of nucleotides in the range of about 1 kb to about 2 kb, about 1 kb to about 3 kb, about 1 kb to about 4 kb, about 1 kb to about 5 kb, about 1 kb to about 6 kb, about 1 kb to about 7 kb, about 1 kb to about 8 kb, about 2 kb to about 3 kb, about 2 kb to about 4 kb, about 2 kb to about 5 kb, about 2 kb to about 6 kb, about 2 kb to about 7 kb, about 2 kb to about 8 kb, about 3 kb to about 4 kb, about 3 kb to about 5 kb, about 3 kb to about 6 kb, about 3 kb to about 7 kb, about 3 kb to about 8 kb, about 4 kb to about 5 kb, about 4 kb to about 6 kb, about 4 kb to about 7 kb, about 4 kb to about 8 kb, about 5 kb to about 6 kb, about 5 kb to about 7 kb, about 5 kb to about 8 kb, about 6 kb to about 7 kb, about 6 kb to about 8 kb, or about 7 kb to about 8 kb.

[0393] Any of the nucleic acids described herein can further include a control sequence, e.g., a control sequence selected from the group of a transcription initiation sequence, a transcription termination sequence, a promoter sequence, an enhancer sequence, an RNA splicing sequence, a polyadenylation (poly(A)) sequence, a Kozak consensus sequence, and/or additional untranslated regions which may house pre- or post-transcriptional regulatory and/or control elements. In some embodiments, a promoter can be a native promoter, a constitutive promoter, an inducible promoter, and/or a tissue-specific promoter. Non-limiting examples of control sequences are described herein.

[0394] In some embodiments, the present disclosure provides for a cargo component that further comprises one or more sequence elements, or the complement thereof, selected from the group consisting of: a promoter, an enhancer, a silencer, an insulator, a transcriptional regulatory element, a translational regulatory element, a splice donor, a splice acceptor, a transcriptional terminator, a translational start site, a translational stop site, a packaging signal, an integration signal, inverted terminal repeats (ITRs), and any combination thereof. Exemplary sequence elements are described herein.

### 2. Plasmid

[0395] In some embodiments, a nucleic acid (e.g., cargo nucleic acid) is or comprises a plasmid. In some embodiments, a nucleic acid is a DNA plasmid. In some embodiments, a nucleic acid is an RNA plasmid. In some embodiments, a plasmid is able to replicate independently in a cell. In some embodiments, a plasmid comprises an origin of replication sequence. In some embodiments, a plasmid is a nanoplasmid.

[0396] Nucleic acids provided herein can be of different sizes. In some embodiments, a nucleic acid is a plasmid and can include a total length of up to about 1 kb, up to about 2 kb, up to about 3 kb, up to about 4 kb, up to about 5 kb, up to about 6 kb, up to about 7 kb, up to about 8 kb, up to about 9 kb, up to about 10 kb, up to about 11 kb, up to about 12 kb, up to about 13 kb, up to about 14 kb, or up to about 15 kb. In some embodiments, a nucleic acid is a plasmid and can have a total length in a range of about 1 kb to about 2 kb, about 1 kb to about 3 kb, about 1 kb to about 4 kb, about 1 kb to about 5 kb, about 1 kb to about 6 kb, about 1 kb to about 7 kb, about 1 kb to about 8 kb, about 1 kb to about 9 kb, about 1 kb to about 10 kb, about 1 kb to about 11 kb, about 1 kb to about 12 kb, about 1 kb to about 13 kb, about 1 kb to about 14 kb, or about 1 kb to about 15 kb.

[0397] In some embodiments, the present disclosure provides for a plasmid comprising a cargo component that further comprises one or more sequence elements, or the complement thereof, selected from the group consisting of: a promoter, an enhancer, a silencer, an insulator, a transcriptional regulatory element, a translational regulatory element, a splice donor, a splice acceptor, a transcriptional terminator, a translational start site, a translational stop site, a packaging signal, an integration signal, inverted terminal repeats (ITRs), and any combination thereof. Exemplary sequence elements are described herein.

### 3. RNA

[0398] In certain embodiments, the disclosed compositions comprise nucleic acids. In some embodiments, nucleic acids are RNAs. In some embodiments, nucleic acids comprise modified nucleic acids. In some embodiments, nucleic acids comprise modified RNAs. Among other things, the present disclosure describes that selection and combination of nucleic acids as described herein impacts characteristics of cargo nucleic acid such as stability and ionizability.

### A. Modified RNAs

[0399] In certain embodiments, the disclosed compositions and/or nucleic acids comprise modified nucleic acids, including modified RNAs.

[0400] Modified nucleosides or nucleotides can be present in an RNA, for example a mRNA. A mRNA comprising one or more modified nucleosides or nucleotides, for example, is called a “modified” RNA to describe the presence of one or more non-naturally and/or naturally occurring components or configurations that are used instead of or in addition to the canonical A, G, C, and U residues. In some embodiments, a modified RNA is synthesized with a non-canonical nucleoside or nucleotide, here called “modified.”

[0401] Modified nucleosides and nucleotides can include one or more of: (i) alteration, e.g., replacement, of one or both of the non-linking phosphate oxygens and/or of one or more of the linking phosphate oxygens in the phosphodiester backbone linkage (an exemplary backbone modification); (ii) alteration, e.g., replacement, of a constituent of the ribose sugar, e.g., of the 2′ hydroxyl on the ribose sugar (an exemplary sugar modification); (iii) wholesale replacement of the phosphate moiety with “dephospho” linkers (an exemplary backbone modification); (iv) modification or replacement of a naturally occurring nucleobase, including with a non-canonical nucleobase (an exemplary base modification); (v) replacement or modification of the ribose-phosphate backbone (an exemplary backbone modification); (vi) modification of the 3′ end or 5′ end of the oligonucleotide, e.g., removal, modification or replacement of a terminal phosphate group or conjugation of a moiety, cap or linker (such 3′ or 5′ cap modifications may comprise a sugar and/or backbone modification); and (vii) modification or replacement of the sugar (an exemplary sugar modification). Certain embodiments comprise a 5′ end modification to an mRNA or nucleic acid. Certain embodiments comprise a 3′ end modification to an mRNA or nucleic acid. A modified RNA can contain 5′ end and 3′ end modifications. A modified RNA can contain one or more modified residues at non-terminal locations. In certain embodiments, an mRNA includes at least one modified residue.

[0402] Unmodified nucleic acids can be prone to degradation by, e.g., intracellular nucleases or those found in serum. For example, nucleases can hydrolyze nucleic acid phosphodiester bonds. Accordingly, in one aspect the RNAs (e.g., mRNAs) described herein can contain one or more modified nucleosides or nucleotides, e.g., to introduce stability toward intracellular or serum-based nucleases. The term “innate immune response” includes a cellular response to exogenous nucleic acids, including single stranded nucleic acids, which involves the induction of cytokine expression and release, particularly the interferons, and cell death.

[0403] Accordingly, in some embodiments, RNA or nucleic acids in the disclosed the disclosed compositions, preparations, nanoparticles, and/or nanomaterials comprise at least one modification which confers increased or enhanced stability to the nucleic acid, including, for example, improved resistance to nuclease digestion in vivo. As used herein, the terms “modification” and “modified” as such terms relate to the nucleic acids provided herein, include at least one alteration which preferably enhances stability and renders the RNA or nucleic acid more stable (e.g., resistant to nuclease digestion) than the wild-type or naturally occurring version of the RNA or nucleic acid. As used herein, the terms “stable” and “stability” as such terms relate to the nucleic acids of the present invention, and particularly with respect to the RNA, refer to increased or enhanced resistance to degradation by, for example nucleases (i.e., endonucleases or exonucleases) which are normally capable of degrading such RNA. Increased stability can include, for example, less sensitivity to hydrolysis or other destruction by endogenous enzymes (e.g., endonucleases or exonucleases) or conditions within the target cell or tissue, thereby increasing or enhancing the residence of such RNA in the target cell, tissue, subject and/or cytoplasm. The stabilized RNA molecules provided herein demonstrate longer half-lives relative to their naturally occurring, unmodified counterparts (e.g., the wild-type version of the mRNA). Also contemplated by the terms “modification” and “modified” as such terms related to the mRNA of the LNP compositions disclosed herein are alterations which improve or enhance translation of mRNA nucleic acids, including for example, the inclusion of sequences which function in the initiation of protein translation (e.g., the Kozac consensus sequence). (Kozak, M., Nucleic Acids Res 15 (20): 8125-48 (1987), the contents of which are hereby incorporated by reference herein in its entirety).

[0404] In some embodiments, an RNA or nucleic acid of the disclosed compositions, preparations, nanoparticles, and/or nanomaterials disclosed herein have undergone a chemical or biological modification to render it more stable. Exemplary modifications to an RNA include the depletion of a base (e.g., by deletion or by the substitution of one nucleotide for another) or modification of a base, for example, the chemical modification of a base. The phrase “chemical modifications” as used herein, includes modifications which introduce chemistries which differ from those seen in naturally occurring RNA, for example, covalent modifications such as the introduction of modified nucleotides, (e.g., nucleotide analogs, or the inclusion of pendant groups which are not naturally found in such RNA molecules).

[0405] In some embodiments of a backbone modification, the phosphate group of a modified residue can be modified by replacing one or more of the oxygens with a different substituent. Further, the modified residue, e.g., modified residue present in a modified nucleic acid, can include the wholesale replacement of an unmodified phosphate moiety with a modified phosphate group as described herein. In some embodiments, the backbone modification of the phosphate backbone can include alterations that result in either an uncharged linker or a charged linker with unsymmetrical charge distribution. Examples of modified phosphate groups include, phosphorothioate, phosphoroselenates, borano phosphates, borano phosphate esters, hydrogen phosphonates, phosphoroamidates, alkyl or aryl phosphonates and phosphotriesters. The phosphorous atom in an unmodified phosphate group is achiral. However, replacement of one of the non-bridging oxygens with one of the above atoms or groups of atoms can render the phosphorous atom chiral. The stereogenic phosphorous atom can possess either the “R” configuration (herein Rp) or the “S” configuration (herein Sp). The backbone can also be modified by replacement of a bridging oxygen, (i.e., the oxygen that links the phosphate to the nucleoside), with nitrogen (bridged phosphoroamidates), sulfur (bridged phosphorothioates) and carbon (bridged methylenephosphonates). The replacement can occur at either linking oxygen or at both of the linking oxygens. The phosphate group can be replaced by non-phosphorus containing connectors in certain backbone modifications. In some embodiments, the charged phosphate group can be replaced by a neutral moiety. Examples of moieties which can replace the phosphate group can include, without limitation, e.g., methyl phosphonate, hydroxylamino, siloxane, carbonate, carboxymethyl, carbamate, amide, thioether, ethylene oxide linker, sulfonate, sulfonamide, thioformacetal, formacetal, oxime, methyleneimino, methylenemethylimino, methylenehydrazo, methylenedimethylhydrazo and methyleneoxymethylimino.

### 4. Other

[0406] In certain embodiments, cargo nucleic acids comprise other components. In some embodiments, cargo nucleic acids comprise one or more of components such as promoters, enhancers, untranslated regions (UTRs), internal ribosome entry sites (IRES), splice sites, polyadenylation sequences, sequences comprising destabilization domains, reporter sequences or elements, and/or other additional sequences. Among other things, the present disclosure describes that selection and combination of one or more of the components as described herein impacts characteristics of nucleic acids such as stability, expression, localization and tropism.

### A. Promoters

[0407] In some embodiments, a nucleic acid comprises a promoter. The term “promoter” refers to a DNA sequence recognized by enzymes/proteins that can promote and/or initiate transcription of an operably linked gene (e.g., a nucleic acid encoding a cargo polypeptide). For example, a promoter typically refers to, e.g., a nucleotide sequence to which an RNA polymerase and/or any associated factor binds and from which it can initiate transcription. Thus, in some embodiments, a nucleic acid (e.g., disposed within a delivery particle) comprises a promoter operably linked to one of the non-limiting example promoters described herein.

[0408] In some embodiments, a promoter is an inducible promoter, a constitutive promoter, a mammalian cell promoter, a viral promoter, a chimeric promoter, an engineered promoter, a tissue-specific promoter, or any other type of promoter known in the art. In some embodiments, a promoter is a RNA polymerase II promoter, such as a mammalian RNA polymerase II promoter. In some embodiments, a promoter is a RNA polymerase III promoter, including, but not limited to, a HI promoter, a human U6 promoter, a mouse U6 promoter, or a swine U6 promoter. A promoter will generally be one that is able to promote transcription in a cell, tissue, organ, organoid, or organism of interest. In some embodiments, a promoter is a mammalian cell-specific promoter.

[0409] A variety of promoters are known in the art, which can be used herein. Non-limiting examples of promoters that can be used herein include: human EF1α, human cytomegalovirus (CMV) (U.S. Pat. No. 5,168,062, which is incorporated in its entirety herein by reference), human ubiquitin C (UBC), mouse phosphoglycerate kinase 1, polyoma adenovirus, simian virus 40 (SV40), β-globin, β-actin, α-fetoprotein, γ-globin, β-interferon, γ-glutamyl transferase, mouse mammary tumor virus (MMTV), Rous sarcoma virus, rat insulin, glyceraldehyde-3-phosphate dehydrogenase, metallothionein H (MT II), amylase, cathepsin, MI muscarinic receptor, retroviral LTR (e.g., human T-cell leukemia virus HTLV), AAV ITR, interleukin-2, collagenase, platelet-derived growth factor, adenovirus 5 E2, stromelysin, murine MX gene, glucose regulated proteins (GRP78 and GRP94), α-2-macroglobulin, vimentin, MHC class I gene H-2K b, HSP70, proliferin, tumor necrosis factor, thyroid stimulating hormone a gene, immunoglobulin light chain, T-cell receptor, HlA DQa and DQ, interleukin-2 receptor, MHC class II, MHC class II HlA-DRa, muscle creatine kinase, prealbumin (transthyretin), elastase 1, albumin gene, c-fos, c-HA-ras, neural cell adhesion molecule (NCAM), H2B (TH2B) histone, rat growth hormone, human serum amyloid (SAA), troponin I (TN I), duchenne muscular dystrophy, human immunodeficiency virus, and Gibbon Ape Leukemia Virus (GALV) promoters. Additional examples of promoters are known in the art. See, e.g., Lodish, Molecular Cell Biology, Freeman and Company, New York 2007, each of which is incorporated in its entirety herein by reference. In some embodiments, a promoter is the CMV immediate early promoter. In some embodiments, the promoter is a CAG promoter or a CAG/CBA promoter. The term “constitutive” promoter refers to a nucleotide sequence that, when operably linked with a nucleic acid encoding a cargo polypeptide, causes RNA to be transcribed from the nucleic acid in a cell under most or all physiological conditions.

[0410] Examples of constitutive promoters include, without limitation, the retroviral Rous sarcoma virus (RSV) LTR promoter, the cytomegalovirus (CMV) promoter (see, e.g., Boshart et al, Cell 41:521-530, 1985, which is incorporated in its entirety herein by reference), the SV40 promoter, the dihydrofolate reductase promoter, the beta-actin promoter, the phosphoglycerol kinase (PGK) promoter, and the EFl-alpha promoter (Invitrogen).

[0411] Inducible promoters allow regulation of gene expression and can be regulated by exogenously supplied compounds, environmental factors such as temperature, or the presence of a specific physiological state, e.g., acute phase, a particular differentiation state of the cell, or in replicating cells only. Inducible promoters and inducible systems are available from a variety of commercial sources, including, without limitation, Invitrogen, Clontech, and Ariad. Additional examples of inducible promoters are known in the art.

[0412] Examples of inducible promoters regulated by exogenously supplied compounds include the zinc-inducible sheep metallothionein (MT) promoter, the dexamethasone (Dex)-inducible mouse mammary tumor virus (MMTV) promoter, the T7 polymerase promoter system (WO 98/10088, which is incorporated in its entirety herein by reference); the ecdysone insect promoter (see, e.g., No et al, Proc. Natl. Acad Sci. US.A. 93:3346-3351, 1996, which is incorporated in its entirety herein by reference), the tetracycline-repressible system (see, e.g., Gossen et al, Proc. Natl. Acad Sci. US.A. 89:5547-5551, 1992, which is incorporated in its entirety herein by reference), the tetracycline-inducible system (see, e.g., Gossen et al, Science 268:1766-1769, 1995; and Harvey et al, Curr. Opin. Chem. Biol. 2:512-518, 1998, each of which is incorporated in their entirety herein by reference), the RU486-inducible system (see, e.g., Wang et al, Nat. Biotech. 15:239-243, 1997; and Wang et al, Gene Ther. 4:432-441, 1997, each of which is incorporated in their entirety herein by reference), and the rapamycin-inducible system (see, e.g., Magari et al. J Clin. Invest. 100:2865-2872, 1997, which is incorporated in its entirety herein by reference).

[0413] The term “tissue-specific” promoter refers to a promoter that is active only in certain specific cell types and/or tissues (e.g., transcription of a specific gene occurs only within cells expressing transcription regulatory and/or control proteins that bind to the tissue-specific promoter).

[0414] In some embodiments, regulatory and/or control sequences impart tissue-specific gene expression capabilities. In some cases, tissue-specific regulatory and/or control sequences bind tissue-specific transcription factors that induce transcription in a tissue-specific manner.

[0415] In some embodiments, provided nucleic acids comprise a promoter sequence selected from a CAG, a CBA, a CMV, or a CB7 promoter.

### B. Enhancers

[0416] In some instances, a construct can include an enhancer sequence. The term “enhancer” refers to a nucleotide sequence that can increase the level of transcription of a nucleic acid encoding a protein of interest (e.g., a cargo polypeptide). Enhancer sequences (generally 50-1500 bp in length) generally increase the level of transcription by providing additional binding sites for transcription-associated proteins (e.g., transcription factors). In some embodiments, an enhancer sequence is found within an intronic sequence. Unlike promoter sequences, enhancer sequences can act at much larger distance away from the transcription start site (e.g., as compared to a promoter). Non-limiting examples of enhancers include a RSV enhancer, a CMV enhancer, and/or a SV40 enhancer.

### C. Flanking Untranslated Regions, 5′ UTRs and 3′ UTRs

[0417] In some embodiments, any of the nucleic acids described herein can include an untranslated region (UTR), such as a 5′ UTR or a 3′ UTR. UTRs of a gene are transcribed but not translated. A 5′ UTR starts at the transcription start site and continues to the start codon but does not include the start codon. A 3′ UTR starts immediately following the stop codon and continues until the transcriptional termination signal. The regulatory and/or control features of a UTR can be incorporated into any of the constructs, compositions, kits, or methods as described herein to enhance or otherwise modulate the expression of a cargo polypeptide.

[0418] Natural 5′ UTRs include a sequence that plays a role in translation initiation, in some embodiments, a 5′ UTR can comprise sequences, like Kozak sequences, which are commonly known to be involved in the process by which the ribosome initiates translation of many genes. Kozak sequences have the consensus sequence CCR(A/G)CCAUGG, where R is a purine (A or G) three bases upstream of the start codon (AUG), and the start codon is followed by another “G”. The 5′ UTRs have also been known to form secondary structures that are involved in elongation factor binding.

[0419] In some embodiments, a 5′ UTR is included in any of the constructs described herein. Non-limiting examples of 5′ UTRs, including those from the following genes: albumin, serum amyloid A, Apolipoprotein A/B/E, transferrin, alpha fetoprotein, erythropoietin, and Factor VIII, can be used to enhance expression of a nucleic acid molecule, such as an mRNA.

[0420] 3′ UTRs are known to have stretches of adenosines and uridines (in the RNA form) or thymidines (in the DNA form) embedded in them. These AU-rich signatures are particularly prevalent in genes with high rates of turnover. Based on their sequence features and functional properties, the AU-rich elements (AREs) can be separated into three classes (see, e.g., Chen et al., Mal. Cell. Biol. 15:5777-5788, 1995; Chen et al., Mal. Cell Biol. 15:2010-2018, 1995, each of which is incorporated herein by reference in its entirety): Class I AREs contain several dispersed copies of an AUUUA motif within U-rich regions. For example, c-Myc and MyoD mRNAs contain class I AREs. Class II AREs possess two or more overlapping UUAUUUA(U/A) (U/A) nonamers. GM-CSF and TNF-alpha mRNAs are examples that contain class II AREs. Class III AREs are less well defined. These U-rich regions do not contain an AUUUA motif, two well-studied examples of this class are c-Jun and myogenin mRNAs.

[0421] Most proteins binding to the AREs are known to destabilize the messenger, whereas members of the ELAV family, most notably HuR, have been documented to increase the stability of mRNA. HuR binds to AREs of all the three classes. Engineering the HuR specific binding sites into the 3′ UTR of nucleic acid molecules will lead to HuR binding and thus, stabilization of the message in vivo.

[0422] In some embodiments, the introduction, removal, or modification of 3′ UTR AREs can be used to modulate the stability of an mRNA encoding a cargo polypeptide. In other embodiments, AREs can be removed or mutated to increase the intracellular stability and thus increase translation and production of a cargo polypeptide.

[0423] In other embodiments, non-ARE sequences may be incorporated into the 5′ or 3′ UTRs. In some embodiments, introns or portions of intron sequences may be incorporated into the flanking regions of the polynucleotides in any of the constructs, compositions, kits, and methods provided herein. Incorporation of intronic sequences may increase protein production as well as mRNA levels.

### D. Internal Ribosome Entry Sites (IRES)

[0424] In some embodiments, a nucleic acid comprising a cargo component can include an internal ribosome entry site (IRES). An IRES forms a complex secondary structure that allows translation initiation to occur from any position with an mRNA immediately downstream from where the IRES is located (see, e.g., Pelletier and Sonenberg, Mal. Cell. Biol. 8(3):1103-1112, 1988).

[0425] There are several IRES sequences known to those in skilled in the art, including those from, e.g., foot and mouth disease virus (FMDV), encephalomyocarditis virus (EMCV), human rhinovirus (HRV), cricket paralysis virus, human immunodeficiency virus (HIV), hepatitis A virus (HAV), hepatitis C virus (HCV), and poliovirus (PV) (see e.g., Alberts, Molecular Biology of the Cell, Garland Science, 2002; and Hellen et al., Genes Dev. 15(13):1593-612, 2001, each of which is incorporated in its entirety herein by reference).

[0426] In some embodiments, the IRES sequence that is incorporated into a construct that encodes a cargo polypeptide, or a C-terminal portion of a cargo polypeptide is the foot and mouth disease virus (FMDV) 2A sequence. The Foot and Mouth Disease Virus 2A sequence is a small peptide (approximately 18 amino acids in length) that has been shown to mediate the cleavage of polyproteins (see, e.g., Ryan, M D et al., EMBO 4:928-933, 1994; Mattion et al., J Virology 70:8124-8127, 1996; Furler et al., Gene Therapy 8:864-873, 2001; and Halpin et al., Plant Journal 4:453-459, 1999, each of which is incorporated in its entirety herein by reference). The cleavage activity of the 2A sequence has previously been demonstrated in artificial systems including plasmids and gene therapy constructs (AAV and retroviruses) (see, e.g., Ryan et al., EMBO 4:928-933, 1994; Mattion et al., J Virology 70:8124-8127, 1996; Furler et al., Gene Therapy 8:864-873, 2001; and Halpin et al., Plant Journal 4:453-459, 1999; de Felipe et al., Gene Therapy 6:198-208, 1999; de Felipe et al., Human Gene Therapy II: 1921-1931, 2000; and Klump et al., Gene Therapy 8:811-817, 2001, each of which is incorporated in its entirety herein by reference).

[0427] An IRES can be utilized in a delivery particle described herein. In some embodiments, a nucleic acid encoding a C-terminal portion of a cargo polypeptide can include a polynucleotide internal ribosome entry site (IRES). In some embodiments, an IRES can be part of a composition comprising more than one nucleic acid. In some embodiments, an IRES is used to produce more than one cargo polypeptide from a single gene transcript.

### E. Splice Sites

[0428] In some embodiments, any of the nucleic acids provided herein can include splice donor and/or splice acceptor sequences, which are functional during RNA processing occurring during transcription. In some embodiments, splice sites are involved in trans-splicing.

### F. Polyadenylation Sequences

[0429] In some embodiments, a construct provided herein can include a polyadenylation (poly(A)) signal sequence. Most nascent eukaryotic mRNAs possess a poly(A) tail at their 3′ end, which is added during a complex process that includes cleavage of the primary transcript and a coupled polyadenylation reaction driven by the poly(A) signal sequence (see, e.g., Proudfoot et al., Cell 108:501-512, 2002, which is incorporated herein by reference in its entirety). A poly(A) tail confers mRNA stability and transferability (see, e.g., Molecular Biology of the Cell, Third Edition by B. Alberts et al., Garland Publishing, 1994, which is incorporated herein by reference in its entirety). In some embodiments, a poly(A) signal sequence is positioned 3′ to the coding sequence.

[0430] As used herein, “polyadenylation” refers to the covalent linkage of a polyadenylyl moiety, or its modified variant, to a messenger RNA molecule. In eukaryotic organisms, most messenger RNA (mRNA) molecules are polyadenylated at the 3′ end. A 3′ poly(A) tail is a long sequence of adenine nucleotides (e.g., 50, 60, 70, 100, 200, 500, 1000, 2000, 3000, 4000, or 5000) (SEQ ID NO: 9063) added to the pre-mRNA through the action of an enzyme, polyadenylate polymerase. In some embodiments, a poly(A) tail is added onto transcripts that contain a specific sequence, e.g., a poly(A) signal. A poly(A) tail and associated proteins aid in protecting mRNA from degradation by exonucleases. Polyadenylation also plays a role in transcription termination, export of the mRNA from the nucleus, and translation. Polyadenylation typically occurs in the nucleus immediately after transcription of DNA into RNA, but also can occur later in the cytoplasm. After transcription has been terminated, an mRNA chain is cleaved through the action of an endonuclease complex associated with RNA polymerase. A cleavage site is usually characterized by the presence of the base sequence AAUAAA near the cleavage site. After the mRNA has been cleaved, adenosine residues are added to the free 3′ end at the cleavage site.

[0431] As used herein, a “poly(A) signal sequence” or “polyadenylation signal sequence” is a sequence that triggers the endonuclease cleavage of an mRNA and the addition of a series of adenosines to the 3′ end of the cleaved mRNA.

[0432] There are several poly(A) signal sequences that can be used, including those derived from bovine growth hormone (bGH) (see, e.g., Woychik et al., Proc. Natl. Acad Sci. US.A. 81(13):3944-3948, 1984; U.S. Pat. No. 5,122,458, each of which is incorporated herein by reference in its entirety), mouse-β-globin, mouse-α-globin (see, e.g., Orkin et al., EMBO J 4(2):453-456, 1985; Thein et al., Blood 71(2):313-319, 1988, each of which is incorporated herein by reference in its entirety), human collagen, polyoma virus (see, e.g., Batt et al., Mal. Cell Biol. 15(9):4783-4790, 1995, which is incorporated herein by reference in its entirety), the Herpes simplex virus thymidine kinase gene (HSV TK), IgG heavy-chain gene polyadenylation signal (US 2006/0040354, which is incorporated herein by reference in its entirety), human growth hormone (hGH) (see, e.g., Szymanski et al., Mal. Therapy 15(7):1340-1347, 2007, which is incorporated herein by reference in its entirety), the group consisting of SV40 poly(A) site, such as the SV40 late and early poly(A) site (see, e.g., Schek et al., Mal. Cell Biol. 12(12):5386-5393, 1992, which is incorporated herein by reference in its entirety).

[0433] The poly(A) signal sequence can be AATAAA. The AATAAA sequence may be substituted with other hexanucleotide sequences with homology to AATAAA and that are capable of signaling polyadenylation, including ATTAAA, AGTAAA, CATAAA, TATAAA, GATAAA, ACTAAA, AATATA, AAGAAA, AATAAT, AAAAAA, AATGAA, AATCAA, AACAAA, AATCAA, AATAAC, AATAGA, AATTAA, or AATAAG (see, e.g., WO 06/12414, which is incorporated herein by reference in its entirety).

[0434] In some embodiments, a poly(A) signal sequence can be a synthetic polyadenylation site (see, e.g., the pCl-neo expression construct of Promega that is based on Levitt el al, Genes Dev. 3(7):1019-1025, 1989, which is incorporated herein by reference in its entirety). In some embodiments, a poly(A) signal sequence is the polyadenylation signal of soluble neuropilin-1 (sNRP) (AAATAAAATACGAAATG (SEQ ID NO: 9058)) (see, e.g., WO 05/073384, which is incorporated herein by reference in its entirety). In some embodiments, a poly(A) signal sequence comprises or consists of the SV40 poly(A) site.

### G. Destabilization Domains

[0435] In some embodiments, any of the nucleic acids provided herein can optionally include a sequence encoding a destabilizing domain (“a destabilizing sequence”) for temporal control of protein expression. Non-limiting examples of destabilizing sequences include sequences encoding a FK506 sequence, a dihydrofolate reductase (DHFR) sequence, or other exemplary destabilizing sequences.

[0436] In the absence of a stabilizing ligand, a protein sequence operatively linked to a destabilizing sequence is degraded by ubiquitination. In contrast, in the presence of a stabilizing ligand, protein degradation is inhibited, thereby allowing the protein sequence operatively linked to the destabilizing sequence to be actively expressed. As a positive control for stabilization of protein expression, protein expression can be detected by conventional means, including enzymatic, radiographic, colorimetric, fluorescence, or other spectrographic assays; fluorescent activating cell sorting (FACS) assays; immunological assays (e.g., enzyme linked immunosorbent assay (ELISA), radioimmunoassay (RIA), and immunohistochemistry).

[0437] Additional examples of destabilizing sequences are known in the art. In some embodiments, the destabilizing sequence is a FK506- and rapamycin-binding protein (FKBP12) sequence, and the stabilizing ligand is Shield-1 (Shld1) (see, e.g., Banaszynski et al. (2012) Cell 126(5): 995-1004, which is incorporated in its entirety herein by reference). In some embodiments, a destabilizing sequence is a DHFR sequence, and a stabilizing ligand is trimethoprim (TMP) (see, e.g., Iwamoto et al. (2010) Chem Biol 17:981-988, which is incorporated in its entirety herein by reference).

[0438] In some embodiments, a destabilizing sequence is a FKBP12 sequence, and a presence of nucleic acids carrying the FKBP12 gene in a subject cell (e.g., a cell of interest (e.g., a glial cell, a liver cell, a tumor cell, etc.)) is detected by Western blotting. In some embodiments, a destabilizing sequence can be used to verify the temporally-specific activity of delivery particles described herein.

### H. Reporter Sequences or Elements

[0439] In some embodiments, nucleic acids provided herein can optionally include a sequence encoding a reporter polypeptide and/or protein (“a reporter sequence”). Non-limiting examples of reporter sequences include DNA sequences encoding: a beta-lactamase, a beta-galactosidase (LacZ), an alkaline phosphatase, a thymidine kinase, a green fluorescent protein (GFP), a red fluorescent protein, an mCherry fluorescent protein, a yellow fluorescent protein, a chloramphenicol acetyltransferase (CAT), and a luciferase. Additional examples of reporter sequences are known in the art. When associated with control elements which drive their expression, the reporter sequence can provide signals detectable by conventional means, including enzymatic, radiographic, colorimetric, fluorescence, or other spectrographic assays; fluorescent activating cell sorting (FACS) assays; immunological assays (e.g., enzyme linked immunosorbent assay (ELISA), radioimmunoassay (RIA), and immunohistochemistry).

[0440] In some embodiments, a reporter sequence is the LacZ gene, and the presence of a construct carrying the LacZ gene in a mammalian cell (e.g., a cell of interest (e.g., a glial cell, a liver cell, a tumor cell, etc.)) is detected by assays for beta-galactosidase activity. When the reporter is a fluorescent protein (e.g., green fluorescent protein) or luciferase, the presence of a construct carrying the fluorescent protein or luciferase in a mammalian cell (e.g., a cell of interest (e.g., a glial cell, a liver cell, a tumor cell, etc.)) may be measured by fluorescent techniques (e.g., fluorescent microscopy or FACS) or light production in a luminometer (e.g., a spectrophotometer or an IVIS imaging instrument). In some embodiments, a reporter sequence can be used to verify the tissue-specific targeting capabilities and tissue-specific promoter regulatory and/or control activity of any of the constructs described herein.

[0441] In some embodiments, a reporter sequence is a FLAG tag (e.g., a 3×FLAG tag), and the presence of a construct carrying the FLAG tag in a mammalian cell (e.g., a cell of interest (e.g., a glial cell, a liver cell, a tumor cell, etc.)) is detected by protein binding or detection assays (e.g., Western blots, immunohistochemistry, radioimmunoassay (RIA), mass spectrometry).

### I. Additional Sequences

[0442] In some embodiments, nucleic acids of the present disclosure may comprise a T2A element or sequence. In some embodiments, nucleic acids of the present disclosure may include one or more cloning sites. In some such embodiments, cloning sites may not be fully removed prior to manufacturing for administration to a subject. In some embodiments, cloning sites may have functional roles including as linker sequences, or as portions of a Kozak site. As will be appreciated by those skilled in the art, cloning sites may vary significantly in primary sequence while retaining their desired function.

### J. Inverted Terminal Repeat Sequences (ITRs)

[0443] In some embodiments, a delivery particle is an AAV delivery particle. AAV derived nucleic sequences of a construct typically comprises the cis-acting 5′ and 3′ ITRs (see, e.g., B. J. Carter, in “Handbook of Parvoviruses”, ed., P. Tijsser, CRC Press, pp. 155 168 (1990), which is incorporated in its entirety herein by reference). Generally, ITRs are able to form a hairpin. The ability to form a hairpin can contribute to an ITRs ability to self-prime, allowing primase-independent synthesis of a second DNA strand. ITRs can also aid in efficient encapsidation of an AAV construct in an AAV delivery particle.

[0444] An rAAV delivery particle (e.g., an AAV2 delivery particle) of the present disclosure can comprise a nucleic acid comprising a cargo component encoding a cargo polypeptide and associated elements flanked by a 5′ and a 3′ AAV ITR sequences. In some embodiments, an ITR is or comprises about 145 nucleic acids. In some embodiments, all or substantially all of a sequence encoding an ITR is used. An AAV ITR sequence may be obtained from any known AAV, including presently identified mammalian AAV types. In some embodiments an ITR is an AAV2 ITR

[0445] An example of a construct molecule employed in the present disclosure is a “cis-acting” construct containing a transgene, in which the selected transgene sequence and associated regulatory elements are flanked by 5′ or “left” and 3′ or “right” AAV ITR sequences. 5′ and left designations refer to a position of an ITR sequence relative to an entire construct, read left to right, in a sense direction. For example, in some embodiments, a 5′ or left ITR is an ITR that is closest to a promoter (as opposed to a polyadenylation sequence) for a given construct, when a construct is depicted in a sense orientation, linearly. Concurrently, 3′ and right designations refer to a position of an ITR sequence relative to an entire construct, read left to right, in a sense direction. For example, in some embodiments, a 3′ or right ITR is an ITR that is closest to a polyadenylation sequence (as opposed to a promoter sequence) for a given construct, when a construct is depicted in a sense orientation, linearly. ITRs as provided herein are depicted in 5′ to 3′ order in accordance with a sense strand. Accordingly, one of skill in the art will appreciate that a 5′ or “left” orientation ITR can also be depicted as a 3′ or “right” ITR when converting from sense to antisense direction. Further, it is well within the ability of one of skill in the art to transform a given sense ITR sequence (e.g., a 5′/left AAV ITR) into an antisense sequence (e.g., 3′/right ITR sequence). One of ordinary skill in the art would understand how to modify a given ITR sequence for use as either a 5′/left or 3′/right ITR, or an antisense version thereof.

### VII. Delivery Particles

[0446] Among other things, the present disclosure provides delivery particles. In some embodiments, a delivery particle is a viral particle, a lipid-based particle [(e.g., cell-produced or not cell-produced), a lipid nanoparticle (LNP), a liposome, a micelle, an extracellular vesicle (e.g., exosomes, microparticles, etc.)], a polymer-based particle (e.g., PGLA), a polysaccharide-based particle, etc. In some embodiments, delivery particles as described herein comprise nucleic acids In some embodiments, a nucleic acid described herein is disposed within a delivery particle. In some embodiments, a nucleic acid described herein is associated (e.g., covalently or non-covalently) with a surface of delivery particle. In some embodiments, a nucleic acid comprises, among other things, a cargo component encoding a cargo polypeptide, that, when expressed, is expressed on a surface of a delivery particle.

i. Virions:

[0447] Among other things, the present disclosure provides virions that comprise a nucleic acid and a capsid as described herein. In some embodiments, virions are delivery particles that comprise a nucleic acid comprising a cargo component encoding a cargo polypeptide or characteristic portion thereof described herein, and a capsid described herein. An exemplary delivery particle is an AAV delivery particle. An exemplary delivery particle is a lentivirus delivery particle. However, other delivery particles may be used.

[0448] In some embodiments, a delivery particle is an AAV delivery particle. AAV delivery particles that comprise a nucleic acid comprising a cargo component encoding a cargo polypeptide or characteristic portion thereof described herein, and a capsid described herein. In some embodiments, AAV delivery particles can be described as having a serotype, which is a description of the construct strain and the capsid strain. For example, in some embodiments an AAV delivery particle may be described as AAV2, wherein the particle has an AAV2 capsid and a construct that comprises characteristic AAV2 Inverted Terminal Repeats (ITRs). In some embodiments, an AAV delivery particle may be described as a pseudotype, wherein the capsid and construct are derived from different AAV strains, for example, AAV2/9 would refer to an AAV delivery particle that comprises a construct utilizing the AAV2 ITRs and an AAV9 capsid.

### 1. AAV Construct

[0449] The present disclosure provides nucleic acids that comprise a cargo component encoding a cargo polypeptide or characteristic portion thereof. In some embodiments described herein, a nucleic acid that comprises a cargo component encoding a cargo polypeptide or characteristic portion thereof can be disposed within an AAV delivery particle.

[0450] In some embodiments, a nucleic acid comprises one or more components derived from or modified from a naturally occurring AAV genomic construct. In some embodiments, a sequence derived from an AAV construct is an AAV1 construct, an AAV2 construct, an AAV3 construct, an AAV4 construct, an AAV5 construct, an AAV6 construct, an AAV7 construct, an AAV8 construct, an AAV9 construct, an AAV2.7m8 construct, an AAV8BP2 construct, an AAV293 construct, an AAV.DJ construct, or AAV Anc80 construct. In some embodiments, an rAAV Anc80 capsid is an rAAV Anc80L65 capsid. Additional exemplary AAV constructs that can be used herein are known in the art (see, e.g., Kanaan et al., Mol. Ther. Nucleic Acids 8:184-197, 2017; Li et al., Mol. Ther. 16(7): 1252-1260, 2008; Adachi et al., Nat. Commun. 5: 3075, 2014; Isgrig et al., Nat. Commun. 10(1): 427, 2019; and Gao et al., J. Virol. 78(12): 6381-6388, 2004; each of which is incorporated in its entirety herein by reference).

[0451] In some embodiments, provided nucleic acids comprise a cargo component, e.g., encoding a cargo polypeptide, one or more regulatory and/or control sequences, and optionally 5′ and 3′ AAV derived inverted terminal repeats (ITRs). In some embodiments wherein a 5′ and 3′ AAV derived ITR is utilized, the polynucleotide construct may be referred to as a recombinant AAV (rAAV) construct. In some embodiments, provided rAAV constructs are packaged into an AAV capsid to form an AAV delivery particle.

[0452] In some embodiments, AAV derived sequences (which are comprised in a polynucleotide construct) typically include the cis-acting 5′ and 3′ ITR sequences (see, e.g., B. J. Carter, in “Handbook of Parvoviruses,” ed., P. Tijsser, CRC Press, pp. 155 168, 1990, which is incorporated herein by reference in its entirety). Typical AAV2-derived ITR sequences are about 145 nucleotides in length. In some embodiments, at least 80% of a typical ITR sequence (e.g., at least 85%, at least 90%, or at least 95%) is incorporated into a construct provided herein. The ability to modify these ITR sequences is within the skill of the art. (see, e.g., texts such as Sambrook et al., “Molecular Cloning. A Laboratory Manual”, 2d ed., Cold Spring Harbor Laboratory, New York, 1989; and K. Fisher et al., J Virol. 70:520 532, 1996, each of which is incorporated in its entirety by reference). In some embodiments, any of the coding sequences and/or constructs described herein are flanked by 5′ and 3′ AAV ITR sequences. The AAV ITR sequences may be obtained from any known AAV, including presently identified AAV types.

[0453] In some embodiments, nucleic acids described in accordance with this disclosure and in a pattern known to the art (see, e.g., Asokan et al., Mol. Ther. 20: 699-7080, 2012, which is incorporated herein by reference in its entirety) are typically comprised of, a coding sequence or a portion thereof, at least one and/or control sequence, and optionally 5′ and 3′ AAV inverted terminal repeats (ITRs). In some embodiments, provided constructs can be packaged into a capsid to create an AAV delivery particle. An AAV delivery particle may be delivered to a selected target cell. In some embodiments, provided constructs comprise an additional optional coding sequence that is a nucleic acid sequence (e.g., inhibitory nucleic acid sequence), heterologous to the nucleic sequences, which encodes a polypeptide, protein, functional RNA molecule (e.g., miRNA, miRNA inhibitor) or other gene product, of interest. In some embodiments, a nucleic acid coding sequence is operatively linked to and/or control components in a manner that permits coding sequence transcription, translation, and/or expression in a cell of a target tissue.

[0454] In some embodiments, a nucleic acid is an rAAV nucleic acid. In some embodiments, an rAAV nucleic acid can include at least 500 bp, at least 1 kb, at least 1.5 kb, at least 2 kb, at least 2.5 kb, at least 3 kb, at least 3.5 kb, at least 4 kb, or at least 4.5 kb. In some embodiments, an AAV construct can include at most 7.5 kb, at most 7 kb, at most 6.5 kb, at most 6 kb, at most 5.5 kb, at most 5 kb, at most 4.5 kb, at most 4 kb, at most 3.5 kb, at most 3 kb, or at most 2.5 kb. In some embodiments, an AAV construct can include about 1 kb to about 2 kb, about 1 kb to about 3 kb, about 1 kb to about 4 kb, about 1 kb to about 5 kb, about 2 kb to about 3 kb, about 2 kb to about 4 kb, about 2 kb to about 5 kb, about 3 kb to about 4 kb, about 3 kb to about 5 kb, or about 4 kb to about 5 kb.

[0455] Any of the nucleic acids described herein can further include regulatory and/or control sequences, e.g., a control sequence selected from the group of a transcription initiation sequence, a transcription termination sequence, a promoter sequence, an enhancer sequence, an RNA splicing sequence, a polyadenylation (poly(A)) sequence, a Kozak consensus sequence, and/or any combination thereof. In some embodiments, a promoter can be a native promoter, a constitutive promoter, an inducible promoter, and/or a tissue-specific promoter. Non-limiting examples of control sequences are described herein.

### 2. AAV Capsids

[0456] The present disclosure provides one or more nucleic acids disposed with an AAV capsid. In some embodiments, an AAV capsid is from or derived from an AAV capsid of an AAV2, 3, 4, 5, 6, 7, 8, 9, 10, DJ, PHP-B, rh8, rh10, rh39, rh43 or Anc80 serotype, or one or more hybrids thereof. In some embodiments, an AAV capsid is from an AAV ancestral serotype

[0457] As provided herein, any combination of AAV capsids and AAV nucleic acids (e.g., comprising AAV ITRs) may be used in recombinant AAV (rAAV) particles of the present disclosure. For example, wild type or variant AAV2 ITRs and Anc80 capsid, wild type or variant AAV2 ITRs and AAV6 capsid, etc. In some embodiments of the present disclosure, an AAV delivery particle is wholly comprised of AAV2 components (e.g., capsid and ITRs are AAV2 serotype). In some embodiments, an AAV delivery particle is an AAV2/6, AAV2/8 or AAV2/9 particle (e.g., an AAV6, AAV8 or AAV9 capsid with an AAV construct having AAV2 ITRs).

ii. Lipid-Based Delivery Particles

[0458] Among other things, the present disclosure provides for compositions, preparations, and/or delivery particles that comprise lipids (e.g., lipid-based delivery particles). In some embodiments, lipid-based delivery particles are produced by a cell. In some embodiments, lipid-based delivery particles are not produced by a cell. The present invention provided for lipid-based delivery particles that may be of various types. In some embodiments, lipid-based delivery particles may be lipid nanoparticles (LNPs). In some embodiments, lipid-based delivery particles may be liposomes. In some embodiments, lipid-based delivery particles may be micelles. In some embodiments, lipid-based delivery particles may be extracellular vesicles (e.g., exosomes).

### 1. Lipid Nanoparticles (LNPs)

[0459] In some embodiments, the present disclosure provides for compositions, preparations, and/or delivery particles that comprise lipid nanoparticles. In some embodiments, lipid nanoparticles comprise one or more components. In some embodiments, lipid nanoparticles comprise one or more components such as compounds, ionizable lipids, sterols, conjugate-linker lipids, and phospholipids. Among other things, the present disclosure describes that selection and combination of one or more of the components as described herein impacts characteristics of lipid nanoparticles such as diameter, pKa, stabilization, and ionizability.

[0460] Among other things, the present disclosure describes that selection and combination of one or more of the components as described herein impacts functional activity of lipid nanoparticles such as tropism, stabilization, and drug delivery efficacy. For example, the present disclosure describes that a combination of components may better suit delivery of nucleic acids comprising a cargo (e.g., a nucleic acid encoding a cargo polypeptide) as described herein. In some embodiments, a cargo comprises RNA. In some embodiments, a cargo comprises DNA.

[0461] In some embodiments, lipid nanoparticles comprise one or more compounds as described herein. In some embodiments, lipid nanoparticles comprise one or more ionizable lipids as described herein. In some embodiments, lipid nanoparticles comprise one or more sterols as described herein. In some embodiments, lipid nanoparticles comprise one or more conjugate-linker lipids as described herein. In some embodiments, lipid nanoparticles comprise one or more phospholipids as described herein.

### A. Ionizable Lipids

[0462] Among other things, the present disclosure describes compositions, preparations, delivery particles, and/or methods that comprise one or more ionizable lipids as described herein.

[0463] Among other things, the present disclosure describes that different ratios of ionizable lipids influence one or more functional activities such as desired tropisms, stabilization, and drug delivery efficacy of compositions, preparations, nanoparticles, and/or nanomaterials described herein. For example, in some embodiments, compositions, preparations delivery particles, and methods can be used to identify an amount of ionizable lipid that is useful and/or critical to functional activity of lipid nanoparticles such as desired tropisms, stabilization, and drug delivery efficacy as described herein. In some embodiments, compositions, preparations delivery particles, and methods can be used to identify characteristic features of an ionizable lipid that is useful and/or critical to functional activity of lipid nanoparticles such as desired tropisms, stabilization, and drug delivery efficacy as described herein.

### B. Sterols

[0464] Among other things, the present disclosure describes compositions, preparations, delivery particles, and/or methods that comprise one or more sterols as described herein.

[0465] In some embodiments, a sterol is a cholesterol, or a variant or derivative thereof. In some embodiments, a cholesterol is modified. In some embodiments, a cholesterol is an oxidized cholesterol. In some embodiments, a cholesterol is esterified cholesterol. Unmodified cholesterol can be acted upon by enzymes to form variants that are side-chain or ring oxidized. In some embodiments, a cholesterol can be oxidized on the beta-ring structure or on the hydrocarbon tail structure. In some embodiments, a sterol is a phytosterol. Exemplary sterols that are considered for use in the disclosed lipid nanoparticles include but are not limited to 25-hydroxycholesterol (25-OH), 20α-hydroxycholesterol (20α-OH), 27-hydroxycholesterol, 6-keto-5α-hydroxycholesterol, 7-ketocholesterol, 7β-hydroxycholesterol, 7α-hydroxycholesterol, 7β-25-dihydroxycholesterol, beta-sitosterol, stigmasterol, brassicasterol, campesterol, or combinations thereof. In some embodiments, a side-chain oxidized cholesterol can enhance cargo delivery relative to other cholesterol variants. In some embodiments, a cholesterol is an unmodified cholesterol. In some embodiments, a cholesterol is campesterol.

[0466] For example, in some embodiments, compositions, preparations delivery particles, and methods can be used to identify an amount of sterol that is useful and/or critical to functional activity of lipid nanoparticles such as desired tropisms, stabilization, and drug delivery efficacy as described herein. In some embodiments, compositions, preparations delivery particles, and methods can be used to identify characteristic features of a sterol that is useful and/or critical to functional activity of lipid nanoparticles such as desired tropisms, stabilization, and drug delivery efficacy as described herein.

### C. Conjugate-Linker Lipids

[0467] Among other things, the present disclosure describes compositions, preparations, delivery particles, and/or methods that comprise one or more conjugate-linker lipids as described herein.

[0468] In some embodiments, a conjugate-linker lipid is or comprises a polyethylene glycol (PEG)-lipid or PEG-modified lipid. In some embodiments, PEG or PEG-modified lipids may be alternately referred to as PEGylated lipids or PEG-lipids. Inclusion of a PEGylating lipid can be used to enhance lipid nanoparticle colloidal stability in vitro and circulation time in vivo. In some embodiments, the PEGylation is reversible in that the PEG moiety is gradually released in blood circulation. Exemplary PEG-lipids include but are not limited to PEG conjugated to saturated or unsaturated alkyl chains having a length of C6-C20. PEG-modified phosphatidylethanolamines, PEG-modified phosphatidic acids, PEG-modified ceramides (PEG-CER), PEG-modified dialkylamines, PEG-modified diacylglycerols (PEG-DAG), PEG-modified dialkylglycerols, and mixtures thereof. For example, in some embodiments, a PEG lipid may be PEG-c-DOMG, PEG-DMG, PEG-DLPE, PEG-DMPE, PEG-DPPE, PEG-DSG or a PEG-DSPE lipid.

[0469] In some embodiments, a conjugate-linker lipid comprises a polyethylene glycol lipid. In some embodiments, the conjugate-linker lipid comprises DiMystyrlGlycerol (DMG), 1,2-Dipalmitoyl-rac-glycerol, methoxypolyethylene Glycol (DPG-PEG), or 1,2-Distearoyl-rac-glycero-3-methylpolyoxyethylene (DSG-PEG). In some embodiments, a conjugate-linker lipid has an average molecular mass from about 500 Da to about 5000 Da. In some embodiments, a conjugate-linker lipid has an average molecular mass of about 2000 Da.

[0470] For example, in some embodiments, compositions, preparations delivery particles, and methods can be used to identify an amount of conjugate-linker lipid that is useful and/or critical to functional activity of lipid nanoparticles such as desired tropisms, stabilization, and drug delivery efficacy as described herein. In some embodiments, compositions, preparations delivery particles, and methods can be used to identify characteristic features of a conjugate-linker lipid that is useful and/or critical to functional activity of lipid nanoparticles such as desired tropisms, stabilization, and drug delivery efficacy as described herein.

### D. Phospholipids

[0471] Among other things, the present disclosure describes compositions, preparations, delivery particles, and/or methods that comprise one or more phospholipids as described herein.

[0472] In some embodiments, one or more phospholipids may assemble into one or more lipid bilayers. In some embodiments, one or more phospholipids may include a phospholipid moiety. In some embodiments, one or more phospholipids may include one or more fatty acid moieties. In some embodiments, one or more phospholipids may include a phospholipid moiety and one or more fatty acid moieties. In some embodiments, a phospholipid moiety includes but is not limited to phosphatidyl choline, phosphatidyl ethanolamine, phosphatidyl glycerol, phosphatidyl serine, phosphatidic acid, 2-lysophosphatidyl choline, and sphingomyelin. In some embodiments, a fatty acid moiety includes but is not limited to lauric acid, myristic acid, myristoleic acid, palmitic acid, palmitoleic acid, stearic acid, oleic acid, linoleic acid, alphalinolenic acid, erucic acid, phytanic acid, arachidic acid, arachidonic acid, eicosapentaenoic acid, behenic acid, docosapentaenoic acid, and docosahexaenoic acid. Non-natural species including natural species with modifications and substitutions including branching, oxidation, cyclization, and alkynes are also contemplated. For example, a phospholipid may be functionalized with or cross-linked to one or more alkynes (e.g., an alkenyl group in which one or more double bonds is replaced with a triple bond). Under appropriate reaction conditions, an alkyne group may undergo a copper-catalyzed cycloaddition upon exposure to an azide. Such reactions may be useful in functionalizing a lipid bilayer of a nanoparticle composition to facilitate membrane permeation or cellular recognition or in conjugating a nanoparticle composition to a useful component such as a targeting or imaging moiety (e.g., a dye).

[0473] Exemplary phospholipids include but are not limited to 1,2-distearoyl-snglycero-3-phosphocholine (DSPC), 1,2-dioleoyl-sn-glycero-3-phosphoethanolamine (DOPE), 1,2-dilinoleoyl-sn-glycero-3-phosphocholine (DLPC), 1,2-dimyristoyl-sn-glycerophosphocholine (DMPC), 1,2-dioleoyl-sn-glycero-3-phosphocholine (DOPC), 1,2-dipalmitoyl-sn-glycero-3-phosphocholine (DPPC), 1,2-diundecanoyl-sn-glycerophosphocholine (DUPC), 1-palmitoyl-2-oleoyl-sn-glycero-3-phosphocholine (POPC), 1,2-di-O-octadecenyl-sn-glycero-3-phosphocholine (18:0 Diether PC), 1-oleoyl-2-cholesterylhemisuccinoy 1-sn-glycero-3-phosphocholine (OChemsPC), 1-hexadecyl snglycero-3-phosphocholine (C16 Lyso PC), 1,2-dilinolenoyl-sn-glycero-3-phosphocholine, 1,2-diarachidonoyl-sn-glycero-3-phosphocholine, 1,2-didocosahexaenoyl-sn-glycero-3-phosphocholine, 1,2-diphytanoyl-sn-glycero-3-phosphoethanolamine (ME 16.0 PE), 1,2-distearoyl-sn-glycero-3-phosphoethanolamine, 1,2-dilinoleoyl-sn-glycero-3-phosphoethanolamine, 1,2-dilinolenoyl-sn-glycero-3-phosphoethanolamine, 1,2-diarachidonoyl-sn-glycero-3-phosphoethanolamine, 1,2-didocosahexaenoyl-sn-glycero-3-phosphoethanolamine, 1,2-dioleoyl-sn-glycero-3-phospho-rac-(1-glycerol) sodium salt (DOPG), dipalmitoylphosphatidylglycerol (DPPG), palmitoyloleoylphosphatidylethanolamine (POPE), distearoyl-phosphatidyl-ethanolamine (DSPE), dipalmitoyl phosphatidyl ethanolamine (DPPE), dimyristoylphosphoethanolamine (DMPE), 1-stearoyl-2-oleoyl-phosphatidy ethanolamine (SOPE), 1-stearoyl-2 oleoylphosphatidylcholine (SOPC), sphingomyelin, phosphatidylcholine, phosphatidylethanolamine, phosphatidylserine, phosphatidylinositol, phosphatidic acid, palmitoyloleoyl phosphatidylcholine, lysophosphatidylcholine, lysophosphatidylethanolamine (LPE), or combinations thereof. In some embodiments, a phospholipid is DSPC. In some embodiments, a phospholipid is DMPC.

[0474] In some embodiments, the phospholipid comprises 1,2-dioleoyl-sn-glycero-3-phosphoethanolamine-N-(succinyl) (succinyl PE), 1,2-distearoyl-sn-glycero-3-phosphocholine (DSPC), cholesterol, 1,2-distearoyl-sn-glycero-3-phosphoethanolamine (DSPE), 1,2-dipalmitoyl-sn-glycero-3-phosphoethanolamine-N-(succinyl) (succinyl-DPPE), 1,2-dioleoyl-sn-glycero-3-phosphoethanolamine (DOPE), 1,2-dimyristoyl-sn-glycero-3-phosphocholine (DMPC), 1,2-dipalmitoyl-sn-glycero-3-phosphocholine (DPPC), or a combination thereof.

[0475] For example, in some embodiments, compositions, preparations delivery particles, and methods can be used to identify an amount of phospholipid that is useful and/or critical to functional activity of lipid nanoparticles such as desired tropisms, stabilization, and drug delivery efficacy as described herein. In some embodiments, compositions, preparations delivery particles, and methods can be used to identify characteristic features of a phospholipid that is useful and/or critical to functional activity of lipid nanoparticles such as desired tropisms, stabilization, and drug delivery efficacy as described herein.

### E. Diameter

[0476] Among other things, the present disclosure describes compositions and/or delivery particles that have an average hydrodynamic diameter from about 30 to about 220 nm. In some embodiments, compositions, preparations, nanoparticles, and/or nanomaterials described herein have an average hydrodynamic diameter that is about 30 nm, 35 nm, 40 nm, 45 nm, 50 nm, 55 nm, 60 nm, 65 nm, 70 nm, 75 nm, 80 nm, 85 nm, 90 nm, 95 nm, 100 nm, 105 nm, 110 nm, 115 nm, 120 nm, 125 nm, 130 nm, 135 nm, 140 nm, 145 nm, 150 nm, 155 nm, 160 nm, 165 nm, 170 nm, 175 nm, 180 nm, 185 nm, 190 nm, 195 nm, 200 nm, 205 nm, 210 nm, 215 nm, 220 nm, or any range having endpoints defined by any two of the aforementioned values. For example, in some embodiments, compositions, preparations, nanoparticles, and/or nanomaterials described herein have an average hydrodynamic diameter from between 50 nm to 200 nm.

[0477] In some embodiments, lipid nanoparticles described herein have an average hydrodynamic diameter from about 30 to about 220 nm. In some embodiments, lipid nanoparticles described herein have an average hydrodynamic diameter that is about 30 nm, 35 nm, 40 nm, 45 nm, 50 nm, 55 nm, 60 nm, 65 nm, 70 nm, 75 nm, 80 nm, 85 nm, 90 nm, 95 nm, 100 nm, 105 nm, 110 nm, 115 nm, 120 nm, 125 nm, 130 nm, 135 nm, 140 nm, 145 nm, 150 nm, 155 nm, 160 nm, 165 nm, 170 nm, 175 nm, 180 nm, 185 nm, 190 nm, 195 nm, 200 nm, 205 nm, 210 nm, 215 nm, 220 nm, or any range having endpoints defined by any two of the aforementioned values. For example, in some embodiments, lipid nanoparticles described herein have an average hydrodynamic diameter from between 50 nm to 200 nm.

### F. Methods of Manufacturing LNPs

[0478] Methods of manufacturing lipid nanoparticles are known in the art. In some embodiments, the described compositions, preparations, and/or delivery particles are manufactured using microfluidics. For instance, exemplary methods of using microfluidics to form lipid nanoparticles are described by Leung, A. K. K, et al., J Phys Chem, 116:18440-18450 (2012), Chen, D., et al., J Am Chem Soc, 134:6947-6951 (2012), and Belliveau, N. M., et al., Molecular Therapy—Nucleic Acids, 1: e37 (2012), the disclosures of which are hereby incorporated by reference in their entireties. Additionally, exemplary methods as described in U.S. Pat. Nos. 8,569,256, 5,965,542 and U.S. Patent Publication Nos. 2016/0199485, 2016/0009637, 2015/0273068, 2015/0265708, 2015/0203446, 2015/0005363, 2014/0308304, 2014/0200257, 2013/086373, 2013/0338210, 2013/0323269, 2013/0245107, 2013/0195920, 2013/0123338, 2013/0022649, 2013/0017223, 2012/0295832, 2012/0183581, 2012/0172411, 2012/0027803, 2012/0058188, 2011/0311583, 2011/0311582, 2011/0262527, 2011/0216622, 2011/0117125, 2011/0091525, 2011/0076335, 2011/0060032, 2010/0130588, 2007/0042031, 2006/0240093, 2006/0083780, 2006/0008910, 2005/0175682, 2005/017054, 2005/0118253, 2005/0064595, 2004/0142025, 2007/0042031, 1999/009076 and PCT Pub. Nos. WO 99/39741, WO 2018/081480, WO 2017/004143, WO 2017/075531, WO 2015/199952, WO 2014/008334, WO 2013/086373, WO 2013/086322, WO 2013/016058, WO 2013/086373, WO2011/141705, and WO 2001/07548, the full disclosures of each of which are herein incorporated by reference in their entirety for the purposes described herein.

[0479] Briefly, a cargo, such as a cargo described herein, is prepared in a first buffer solution. Other lipid nanoparticle components (such as ionizable lipid, conjugate-linker lipids, cholesterol, and phospholipid) are prepared in a second buffer solution. In some embodiments, a syringe pump introduces the two solutions into a microfluidic device. The two solutions come into contact within the microfluidic device to form lipid nanoparticles encapsulating the cargo.

[0480] For example, in some embodiments, cationic lipids, neutral lipids (e.g., DSPC, and/or cholesterol) and polymer-conjugated lipids can be solubilized in ethanol at a pre-determined molar ratio (e.g., ones described herein). In some embodiments, lipid nanoparticles (lipid nanoparticle) are prepared at a total lipid to polyribonucleotides weight ratio of approximately 10:1 to 30:1. In some embodiments, such polyribonucleotides can be diluted to 0.2 mg/mL in acetate buffer.

[0481] In some embodiments, using an ethanol injection technique, a colloidal lipid dispersion comprising polyribonucleotides can be formed as follows: an ethanol solution comprising lipids, such as cationic lipids, neutral lipids, and polymer-conjugated lipids, is injected into an aqueous solution comprising polyribonucleotides (e.g., ones described herein).

[0482] In some embodiments, lipid and polyribonucleotide solutions can be mixed at room temperature by pumping each solution at controlled flow rates into a mixing unit, for example, using piston pumps. In some embodiments, the flow rates of a lipid solution and a RNA solution into a mixing unit are maintained at a ratio of 1:3. Upon mixing, nucleic acid-lipid particles are formed as the ethanolic lipid solution is diluted with aqueous polyribonucleotides. The lipid solubility is decreased, while cationic lipids bearing a positive charge interact with the negatively charged RNA.

[0483] In some embodiments, a solution comprising RNA-encapsulated lipid nanoparticles can be processed by one or more of concentration adjustment, buffer exchange, formulation, and/or filtration.

[0484] In some embodiments, RNA-encapsulated lipid nanoparticles can be processed through filtration.

[0485] In some embodiments, particle size and/or internal structure of lipid nanoparticles (with or without RNAs) may be monitored by appropriate techniques such as, e.g., small-angle X-ray scattering (SAXS) and/or transmission electron cryomicroscopy (CryoTEM).

### 2. Extracellular Vesicles (EVs)

[0486] As described herein, an extracellular vesicle (EV) is a lipid-bound vesicle-like structure. In some embodiments, EVs have a membrane. In some embodiments, EVs have a membrane that is a double layer membrane (e.g., a lipid bilayer). In some embodiments, EVs have a membrane that originates from a cell. In some embodiments, EVs have a membrane that originates from the plasma membrane of a cell.

[0487] The term extracellular vesicle encompasses exosomes, microvesicles, membrane microparticles, ectosomes, blebs or apoptotic bodies. In some embodiments, an EV is classified as an exosome, microvesicle, membrane microparticle, ectosome, bleb or apoptotic body based on the origin of formation.

[0488] In some embodiments, EVs are substantially transparent. In some embodiments, EVs are substantially spherical.

### A. Populations

[0489] In some embodiments, an EV has a diameter within a range of 50 to 1000 nm. In some embodiments, an EV has a diameter within a range of 50 to 750 nm. In some embodiments, an EV has a diameter within a range of 50 to 500 nm. In some embodiments, an EV has a diameter within a range of 50 to 300 nm. In some embodiments, an EV has a diameter within a range of 50 to 200 nm. In some embodiments, an EV has a diameter within a range of 50 to 150 nm. In some embodiments, an EV has a diameter within a range of 100 to 1000 nm. In some embodiments, an EV has a diameter within a range of 100 to 750 nm. In some embodiments, an EV has a diameter within a range of 100 to 500 nm. In some embodiments, an EV has a diameter within a range of 100 to 300 nm. In some embodiments, an EV has a diameter within a range of 100 to 200 nm. In some embodiments, an EV has a diameter of at least 100 nm. In some embodiments, an EV has a diameter of at most 300 nm.

[0490] A population of EVs (e.g., as present in a composition, pharmaceutical composition, medicament, preparation or otherwise) will comprise EVs with a range of diameters. In some embodiments, the median diameter of EVs within a population is 50, 60, 70, 80, 90, 100, 110, 120, 130, 140, 150, 160, 170, 180, 190, 200, 210, 220, 230, 240, 250, 260, 270, 280, 290, or 300 nm (±1, 2, 3, 4, 5, 6, 7, 8, 9 or 10 nm). In some embodiments, the mean diameter of EVs within a population is 50, 60, 70, 80, 90, 100, 110, 120, 130, 140, 150, 160, 170, 180, 190, 200, 210, 220, 230, 240, 250, 260, 270, 280, 290, or 300 nm (+1, 2, 3, 4, 5, 6, 7, 8, 9 or 10 nm).

[0491] A population of EVs may comprise at least 10, 100, 1000, 104, 105, 106, 107, 108, 109, 1010, 1011, 1012, 1013 or 1014 EVs. A population of EVs may comprise at least 10, 100, 1000, 104, 105, 106, 107, 108, 109, 1010, 1011, 1012, 1013 or 1014 EVs per mL of carrier.

### B. Production

[0492] In some embodiments, an extracellular vesicle is derived from a cell into the extracellular environment. An extracellular vesicle may be derived from various cell types under both pathological and physiological conditions. In some embodiments, EVs have a similar composition to the cell from which it is derived from. In some embodiments, an EV is produced from outward budding and fission of cellular membrane. An EV may be produced via a natural process or a chemically-induced or enhance process.

[0493] In some embodiments, EVs are derived from cells that are contacted with a vesicle-inducing agent. A vesicle-inducing agent may be calcium ionophore, lysophosphatidic acid (LPA), or phorbol-12-myristat-13-acetate (PMA).

[0494] In some embodiments, EVs are derived from human cells, or cells of human origin. In some embodiments, EVs are derived from cells that are not modified (e.g., transduced, transfected, infected, or otherwise modified). In some embodiments, EVs are derived from cells that are ex vivo.

[0495] In some embodiments, EVS are derived from hematopoietic cells. In some embodiments, EVs are derived from immune cells. For example, EVs may be derived from red blood cells, white blood cells, cancer cells, stem cells, dendritic cells, macrophages, or other cell types.

### 3. Liposomes

[0496] In some embodiments, the present disclosure provides for compositions, preparations, and/or delivery particles that comprise liposomes.

[0497] The present disclosure contemplates liposomes capable of attaching and releasing nucleic acids, nucleic acid conjugates, polypeptides, and/or fusion proteins as described herein. Liposomes are microscopic spherical lipid bilayers surrounding an aqueous core that are made from amphiphilic molecules such as phospholipids. For example, a liposome may trap a nucleic acid between the hydrophobic tails of the phospholipid micelle. In some embodiments, water soluble agents can be entrapped in the core and lipid-soluble agents can be dissolved in the shell-like bilayer.

[0498] Those skilled in the art will appreciate that, in some embodiments liposomes allow water soluble and water insoluble chemicals to be used together in a medium without the use of surfactants or other emulsifiers. In some embodiments, liposomes can form spontaneously. For example, liposomes can form by forcefully mixing phospholipids in aqueous media. In some embodiments, liposomes can be formed, for example, when water soluble compounds are dissolved in an aqueous solution capable of hydrating phospholipids. Upon formation of the liposomes, these water soluble compounds are trapped within the aqueous liposomal center. The liposome wall, being a phospholipid membrane, holds fat soluble materials such as oils.

[0499] In some embodiments, liposomes provide controlled release of incorporated compounds. In some embodiments, liposomes do not provide controlled release of incorporated compounds. In addition, in some embodiments, liposomes can be coated with water soluble polymers such as polyethylene glycol to increase the pharmacokinetic half-life. Also contemplated is an ultra high-shear technology to refine liposome production, resulting in stable, unilamellar (single layer) liposomes having specifically designed structural characteristics. These unique properties of liposomes allow the simultaneous storage of normally immiscible compounds and the capability of their controlled release.

[0500] The present disclosure contemplates cationic and anionic liposomes, as well as liposomes having neutral lipids. Preferably, cationic liposomes comprise negatively-charged materials by mixing the materials and fatty acid liposomal components and allowing them to charge-associate. Clearly, the choice of a cationic or anionic liposome depends upon the desired pH of the final liposome mixture. Examples of cationic liposomes include lipofectin, lipofectamine, and lipofectace.

[0501] Also contemplated is a delivery particle comprising liposomes that provides controlled release of at least one cargo as described herein. Preferably, liposomes that are capable of controlled release: i) are biodegradable and non-toxic; ii) carry both water and oil soluble compounds; iii) solubilize recalcitrant compounds; iv) prevent compound oxidation; v) promote protein stabilization; vi) control hydration; vii) control compound release by variations in bilayer composition such as, but not limited to, fatty acid chain length, fatty acid lipid composition, relative amounts of saturated and unsaturated fatty acids, and physical configuration; viii) have solvent dependency; iv) have pH-dependency and v) have temperature dependency.

[0502] Compositions of liposomes are broadly categorized into two classifications. Conventional liposomes are generally mixtures of stabilized natural lecithin (PC) that may comprise synthetic identical-chain phospholipids that may or may not contain glycolipids. Special liposomes may comprise: i) bipolar fatty acids; ii) the ability to attach antibodies for tissue-targeted therapies; iii) coated with materials such as, but not limited to lipoprotein and carbohydrate; iv) multiple encapsulation and v) emulsion compatibility.

[0503] Liposomes may be easily made in the laboratory by methods such as, but not limited to, sonication and vibration. Alternatively, compound-delivery liposomes are commercially available. For example, Collaborative Laboratories, Inc. are known to manufacture custom designed liposomes for specific delivery requirements.

iii. Carbohydrate-Based Delivery Particles

[0504] The present disclosure provides for compositions, preparations, and/or delivery particles that comprise carbohydrate-based delivery particles (e.g., polysaccharide-based delivery particles).

[0505] A variety of carbohydrate-based delivery particles are known in the art. Non-limiting examples of carbohydrate-based delivery particles comprise, but are not limited to, chitosan, hyaluronic acid, dextran, arabinogalactan, starch, cyclodextrin, cycloamylose, pullulan, inulin, cellulose, hemicellulose, alginic acid, chondroitin sulfate, heparin, and gums (e.g., natural polysaccharide gums (e.g., Guar gum, xanthum gum, gum Arabic, carrageenan gum, pectin, etc.)) (see, e.g., Barclay, T. G., et al, Carbohydrate Polymer, 2019 Oct. 1; 221; 94-112, which is incorporated in its entirety herein by reference).

[0506] As may be appreciated by a skilled person, carbohydrate-based delivery particles are advantageous for cargo delivery as they have relatively high cargo loading. In some embodiments, a cargo may be released from a carbohydrate-based delivery particle by one or more external stimuli. In some embodiments, a cargo may be released from a carbohydrate-based delivery particle without one or more external stimuli.

[0507] In some embodiments, carbohydrate-based delivery particles are microspheres as described herein. In some embodiments, carbohydrate-based delivery particles are microparticles as described herein. In some embodiments, carbohydrate-based delivery particles are nanoparticles as described herein. In some embodiments, carbohydrate-based delivery particles are microcapsules as described herein. For example, microsphere, microparticle, nanoparticle, and microcapsule construction as described for polymer-based delivery particles may also be used to construct carbohydrate-based delivery particles as described herein.

[0508] Carbohydrate-based delivery particles may be constructed in a number of ways. In some embodiments, for example, a carbohydrate-based delivery particle may be constructed using polysaccharide chemistry. For example, a skilled person may appreciate that carbohydrate-based delivery particles as described herein may be constructed by exploiting functional groups in the polysaccharide. In some embodiments, a carbohydrate-based delivery particle as described herein may be constructed by exploiting a hydroxyl. In some embodiments, a carbohydrate-based delivery particle as described herein may be constructed by exploiting a carboxylic acid. In some embodiments, a carbohydrate-based delivery particle as described herein may be constructed by exploiting an amino group. The chemical nature of these groups makes them useful in the formation of carbohydrate-based delivery particles and binding of cargos (e.g., a cargo polypeptide, a shuttle-cargo polypeptide, a therapeutic polypeptide, nucleic acids encoding a cargo polypeptide, nucleic acids encoding a shuttle-cargo polypeptide, nucleic acids encoding a therapeutic polypeptide, nucleic acids encoding a barcoded cargo polypeptide, nucleic acids encoding a barcoded shuttle-cargo polypeptide, nucleic acids encoding a barcode, nucleic acids encoding a binder, etc.). In some embodiments, formation of carbohydrate-based delivery particles and binding of cargos is or comprises non-covalent interactions. In some embodiments, formation of carbohydrate-based delivery particles and binding of cargos is or comprises covalent linking reactions.

[0509] In some embodiments, carbohydrate-based delivery particles may self-assemble. In some embodiments, carbohydrate-based delivery particles may not self-assemble. In some embodiments, carbohydrate-based delivery particles may self-assemble spontaneously. In some embodiments, carbohydrate-based delivery particles may not self-assemble spontaneously. In some embodiments, carbohydrate-based delivery particles as described herein, may self-assemble to form, for example, hydrogels. In some embodiments, carbohydrate-based delivery particles as described herein, may self-assemble to not form hydrogels. In some embodiments, carbohydrate-based delivery particles as described herein, may self-assemble to form semicrystalline microparticles. In some embodiments, carbohydrate-based delivery particles as described herein, may self-assemble to form crystalline microparticles. In some embodiments, carbohydrate-based delivery particles as described herein, may self-assemble to form hydrophobically modified polysaccharides. In some embodiments, carbohydrate-based delivery particles as described herein, may self-assemble by ionic crosslinking. In some embodiments, carbohydrate-based delivery particles as described herein, may self-assemble by ionic assembly.

[0510] In some embodiments, carbohydrate-based delivery particles may be constructed by chemical crosslinking. In some embodiments, carbohydrate-based delivery particles may be constructed using covalent crosslinks. In some embodiments, carbohydrate-based delivery particles may be constructed using non-covalent crosslinks. In some embodiments, carbohydrate-based delivery particles may be constructed using click chemistry crosslinking. In some embodiments, carbohydrate-based delivery particles may be constructed using disulphide bridges. In some embodiments, carbohydrate-based delivery particles may be constructed using multifunctional reagents. In some embodiments, carbohydrate-based delivery particles may be constructed using alkenyl modification.

[0511] Sizes of carbohydrate-based delivery particles are generally tunable and may be engineered to be of different sizes. In some embodiments, carbohydrate-based delivery particles, as described herein, may be between 10 nm and 1000 nm in diameter. In some embodiments, carbohydrate-based delivery particles, as described herein, may be between 1 μm and 1000 μm.

iv. Polymer-Based Delivery Particles

[0512] The present disclosure provides for compositions, preparations, and/or delivery particles that comprise polymer-based delivery particles.

[0513] For example, in some embodiments, delivery particles described herein comprise poly(lactide-co-glycolide), aliphatic polyesters including, but not limited to, poly-glycolic acid and poly-lactic acid, hyaluronic acid, polyurethanes, polyacrylic acids, pseudo-poly(amino acids), polyhydroxybutyrate-related copolymers, polyanhydrides, polymethylmethacrylate, poly(ethylene oxide), lecithin and phospholipids.

[0514] In some embodiments, polymer-based delivery particles are microspheres as described herein. In some embodiments, polymer-based delivery particles are microparticles as described herein. In some embodiments, polymer-based delivery particles are microcapsules as described herein.

[0515] Microspheres and microcapsules are useful due to their ability to maintain a generally uniform distribution, provide stable controlled compound release and are economical to produce and dispense. Preferably, an associated delivery gel or the compound-impregnated gel is clear or, alternatively, said gel is colored for easy visualization by medical personnel.

[0516] Microspheres are obtainable commercially (ProLease™, Alkermes: Cambridge, Mass.). For example, a freeze-dried medium comprising at least one therapeutic agent is homogenized in a suitable solvent and sprayed to manufacture microspheres in the range of 20 to 90 μm. Techniques are then followed that maintain sustained-release integrity during phases of purification, encapsulation, and storage. Scott et al., Improving Protein Therapeutics With Sustained Release Formulations, Nature Biotechnology, Volume 16:153-157 (1998). Modification of the microsphere composition by the use of biodegradable polymers can provide an ability to control the rate of nucleic acid release. Miller et al., Degradation rates of Oral Resorbable Implants, Polylactates and Polyglycolates: Rate Modification and Changes in PLA/PGA Copolymer Ratios, J. Biomed. Mater. Res., Vol. 11:711-719 (1977).

[0517] Alternatively, a sustained- or controlled-release microsphere preparation is prepared using an in-water drying method, where an organic solvent solution of a biodegradable polymer metal salt is first prepared. Subsequently, a dissolved or dispersed medium of nucleic acid(s) is added to the biodegradable polymer metal salt solution. The weight ratio of nucleic acid(s) to the biodegradable polymer metal salt may for example be about 1:100000 to about 1:1, preferably about 1:20000 to about 1:500 and more preferably about 1:10000 to about 1:500. Next, the organic solvent solution containing the biodegradable polymer metal salt and nucleic acid(s) is poured into an aqueous phase to prepare an oil/water emulsion. The solvent in the oil phase is then evaporated off to provide microspheres. Finally, these microspheres are then recovered, washed and lyophilized. Thereafter, the microspheres may be heated under reduced pressure to remove the residual water and organic solvent.

[0518] Other methods useful in producing microspheres that are compatible with a biodegradable polymer metal salt and nucleic acid mixture are: i) phase separation during a gradual addition of a coacervating agent; ii) an in-water drying method or phase separation method, where an antiflocculant is added to prevent particle agglomeration and iii) by a spray-drying method.

[0519] Also contemplated in the disclosure is a medium comprising a microsphere or microcapsule capable of delivering controlled release of a nucleic acid for a duration of approximately between 1 day and 6 months. The microsphere or microparticle may be colored to allow the user the ability to see the medium clearly as it is dispensed. The microsphere or microcapsule may be clear. The microsphere or microparticle may be impregnated with a radio-opaque fluoroscopic dye.

[0520] Controlled-release microcapsules may be produced by using known encapsulation techniques such as centrifugal extrusion, pan coating and air suspension. Such microspheres and/or microcapsules can be engineered to achieve desired release rates. For example, Oliosphere™ (Macromed) is a controlled-release microsphere system. These particular microspheres are available in uniform sizes ranging between 5-500 μm and composed of biocompatible and biodegradable polymers. Specific polymer compositions of a microsphere can control the nucleic acid release rate such that custom-designed microspheres are possible, including effective management of the burst effect. ProMaxx™ (Epic Therapeutics, Inc.) is a protein-matrix delivery system. The system is aqueous in nature and is adaptable to standard pharmaceutical delivery models. In particular, ProMaxx™ are bioerodible protein microspheres that deliver both small and macromolecular drugs, and may be customized regarding both microsphere size and desired release characteristics.

[0521] A microsphere or microparticle may comprise a pH sensitive encapsulation material that is stable at a pH less than the pH of the internal mesentery. The typical range in the internal mesentery is pH 7.6 to pH 7.2. Consequently, the microcapsules should be maintained at a pH of less than 7. However, if pH variability is expected, the pH sensitive material can be selected based on the different pH criteria needed for the dissolution of the microcapsules. The encapsulated nucleic acid, therefore, will be selected for the pH environment in which dissolution is desired and stored in a pH preselected to maintain stability. Examples of pH sensitive material useful as encapsulants are Eudragit™ L-100 or S-100 (Rohm GMBH), hydroxypropyl methylcellulose phthalate, hydroxypropyl methylcellulose acetate succinate, polyvinyl acetate phthalate, cellulose acetate phthalate, and cellulose acetate trimellitate. Lipids may comprise the inner coating of the microcapsules. In these compositions, these lipids may be, but are not limited to, partial esters of fatty acids and hexitiol anhydrides, and edible fats such as triglycerides. Lew C. W, Controlled-Release pH Sensitive Capsule And Adhesive System And Method. U.S. Pat. No. 5,364,634 (herein incorporated by reference).

[0522] The present invention contemplates a microparticle comprising a gelatin, or other polymeric cation having a similar charge density to gelatin (i.e., poly-L-lysine) and is used as a complex to form a primary microparticle. A primary microparticle is produced as a mixture of the following composition: i) Gelatin (60 bloom, type A from porcine skin), ii) chondroitin 4-sulfate (0.005%-0.1%), iii) glutaraldehyde (25%, grade 1), and iv) 1-ethyl-3-(3-dimethylaminopropyl)-carbodiimide hydrochloride (EDC hydrochloride), and ultra-pure sucrose (Sigma Chemical Co., St. Louis, Mo.). The source of gelatin is not thought to be critical; it can be from bovine, porcine, human, or other animal source. Typically, the polymeric cation is between 19,000-30,000 daltons. Chondroitin sulfate is then added to the complex with sodium sulfate, or ethanol as a coacervation agent.

[0523] Following the formation of a microparticle, a nucleic acid is directly bound to the surface of the microparticle or is indirectly attached via a “bridge” or “spacer”. The amino groups of the gelatin lysine groups are easily derivatized to provide sites for direct coupling of a compound. Alternatively, spacers (i.e., linking molecules and derivatizing moieties on targeting ligands) such as avidin-biotin are also useful to indirectly couple targeting ligands to the microparticles. Stability of the microparticle is controlled by the amount of glutaraldehyde-spacer crosslinking induced by the EDC hydrochloride. A controlled-release medium is also empirically determined by the final density of glutaraldehyde-spacer crosslinks.

[0524] The present invention contemplates microparticles formed by spray-drying a composition comprising fibrinogen or thrombin with a nucleic acid. Preferably, these microparticles are soluble and the selected protein (i.e., fibrinogen or thrombin) creates the walls of the microparticles. Consequently, the nucleic acids are incorporated within, and between, the protein walls of the microparticle. Heath et al., Microparticles And Their Use In Wound Therapy. U.S. Pat. No. 6,113,948 (herein incorporated by reference). Following the application of the microparticles to living tissue, the subsequent reaction between the fibrinogen and thrombin creates a tissue sealant, thereby releasing the incorporated compound into the immediate surrounding area.

[0525] One having skill in the art will understand that the shape of the microspheres need not be exactly spherical, only to be small particles capable of being administered by an appropriate route to the site or subject of interest. Microparticles may be comprised of a biocompatible and/or biodegradable material selected from the group consisting of polylactide, polyglycolide and copolymers of lactide/glycolide (PLGA), hyaluronic acid, modified polysaccharides and any other well-known material.

v. Other Delivery Particles

[0526] In some embodiments, delivery particles, as contemplated herein. may be any delivery particle known in the art. For example, in some embodiments, delivery particles may be beads, metal-based (e.g., Au, Si, Zn, Fe) particles, micelles, etc.

vi. Production Nucleic Acids and Cells

[0527] Among other things, the present disclosure provides for production nucleic acids, e.g., from which a viral delivery particle as described herein is produced. Moreover, among other things, the present disclosure provides for production cells that contain and/or produce nucleic acids used to produce a viral delivery particle as described herein.

### 1. Production Nucleic Acids and Cells for Viral Delivery Particles

[0528] For example, in some embodiments, a viral delivery particle is an AAV delivery particle. AAV delivery particles, and related AAV systems and AAV constructs are generally well known in the art (see, e.g., Kelleher and Vos, Biotechniques, 17(6):1110-17 (1994); Cotten et al., P.N.A.S. U.S.A., 89(13):6094-98 (1992); Curiel, Nat Immun, 13(2-3):141-64 (1994); Muzyczka, Curr Top Microbiol Immunol, 158:97-129 (1992); and Asokan A, et al., Mol. Ther., 20(4):699-708 (2012), each of which is incorporated in its entirety herein by reference). Methods for generating and using AAV constructs are described, for example, in U.S. Pat. Nos. 5,139,941, 4,797,368 and PCT filing application US2019/060328, each of which is incorporated in its entirety herein by reference.

[0529] Methods for obtaining viral constructs are known in the art. For example, to produce AAV constructs, the methods typically involve culturing a host cell which contains a nucleic acid sequence encoding an AAV capsid protein or fragment thereof; a functional rep gene; a recombinant AAV construct composed of AAV inverted terminal repeats (ITRs) and a coding sequence; and/or sufficient helper functions to permit packaging of the recombinant AAV construct into the AAV capsid proteins.

[0530] In some embodiments, components to be cultured in a host cell to package an AAV construct in an AAV capsid may be provided to the host cell in trans. Alternatively, any one or more components (e.g., recombinant AAV construct, rep sequences, cap sequences, and/or helper functions) may be provided by a stable host cell that has been engineered to contain one or more such components using methods known to those of skill in the art. In some embodiments, such a stable host cell contains such component(s) under the control of an inducible promoter. In some embodiments, such component(s) may be under the control of a constitutive promoter. In some embodiments, a selected stable host cell may contain selected component(s) under the control of a constitutive promoter and other selected component(s) under the control of one or more inducible promoters. For example, a stable host cell may be generated that is derived from HEK293 cells (which contain E1 helper functions under the control of a constitutive promoter), but that contain the rep and/or cap proteins under the control of inducible promoters. Other stable host cells may be generated by one of skill in the art using routine methods.

[0531] Recombinant AAV construct, rep sequences, cap sequences, and helper functions required for producing an AAV of the disclosure may be delivered to a packaging host cell using any appropriate genetic element (e.g., construct). A selected genetic element may be delivered by any suitable method known in the art, e.g., to those with skill in nucleic acid manipulation and include genetic engineering, recombinant engineering, and synthetic techniques (see, e.g., Sambrook et al, Molecular Cloning: A Laboratory Manual, Cold Spring Harbor Press, Cold Spring Harbor, N.Y., which is incorporated in its entirety herein by reference). Similarly, methods of generating AAV particles are well known and any suitable method can be used with the present disclosure (see, e.g., K. Fisher et al, J. Virol., 70:520-532 (1993) and U.S. Pat. No. 5,478,745, which are incorporated in their entirety herein by reference).

[0532] In some embodiments, recombinant AAVs may be produced using a triple transfection method (e.g., as described in U.S. Pat. No. 6,001,650, which is incorporated in its entirety herein by reference). In some embodiments, recombinant AAVs are produced by transfecting a host cell with a recombinant AAV construct (comprising a coding sequence) to be packaged into AAV particles, an AAV helper function construct, and an accessory function construct. An AAV helper function construct encodes “AAV helper function” sequences (i.e., rep and cap), which function in trans for productive AAV replication and encapsidation. In some embodiments, the AAV helper function construct supports efficient AAV construct production without generating any detectable wild type AAV particles (i.e., AAV particles containing functional rep and cap genes). Non-limiting examples of constructs suitable for use with the present disclosure include pHLP19 (see, e.g., U.S. Pat. No. 6,001,650, which is incorporated in its entirety herein by reference) and pRep6cap6 construct (see, e.g., U.S. Pat. No. 6,156,303, which is incorporated in its entirety herein by reference). An accessory function construct encodes nucleotide sequences for non-AAV derived viral and/or cellular functions upon which AAV is dependent for replication (i.e., “accessory functions”). Accessory functions may include those functions required for AAV replication, including, without limitation, those moieties involved in activation of AAV gene transcription, stage specific AAV mRNA splicing, AAV DNA replication, synthesis of cap expression products, and AAV capsid assembly. Viral-based accessory functions can be derived from any known helper viruses such as adenovirus, herpesvirus (other than herpes simplex virus type-1), and vaccinia virus.

[0533] Additional methods for generating and isolating AAV viral constructs suitable for delivery to a subject are described in, e.g., U.S. Pat. Nos. 7,790,449; 7,282,199; WO 2003/042397; WO 2005/033321, WO 2006/110689; and U.S. Pat. No. 7,588,772, each of which is incorporated in its entirety herein by reference. In one system, a producer cell line is transiently transfected with a construct that encodes a coding sequence flanked by ITRs and a construct(s) that encodes rep and cap. In another system, a packaging cell line that stably supplies rep and cap is transiently transfected with a construct encoding a coding sequence flanked by ITRs. In each of these systems, AAV particles are produced in response to infection with helper adenovirus or herpesvirus, and AAVs are separated from contaminating virus. Other systems do not require infection with helper virus to recover the AAV—the helper functions (i.e., adenovirus E1, E2a, VA, and E4 or herpesvirus UL5, UL5, UL52, and UL29, and herpesvirus polymerase) are also supplied, in trans, by the system. In such systems, helper functions can be supplied by transient transfection of the cells with constructs that encode the helper functions, or the cells can be engineered to stably contain genes encoding the helper functions, the expression of which can be controlled at the transcriptional or posttranscriptional level.

[0534] Other types of viral delivery particles can be produced in accordance with embodiments described herein.

### 2. Production Nucleic Acids and Cells for Extracellular Vesicle Delivery Particles

[0535] Among other things, the present disclosure provides for production of nucleic acids, e.g., from which an extracellular vesicle delivery particle (EV) as described herein is produced. Moreover, among other things, the present disclosure provides for production cells that contain and/or produce nucleic acids used to produce an extracellular vesicle delivery particle as described herein.

[0536] EVs, e.g., exosomes, of the present disclosure can be produced from a cell grown in vitro or a body fluid of a subject. When exosomes are produced from in vitro cell culture, various producer cells, e.g., HEK293 cells, CHO cells, C2C12, and MSCs, can be used. In some aspects, producer cells can be selected from HEK293 cells, HEK293S cells, HEK293SF cells, Chinese Hamster Ovary (CHO) cells, mesenchymal stem cells (MSCs), BJ human foreskin fibroblast cells, fHDF fibroblast cells, AGE.HN® neuronal precursor cells, CAP® amniocyte cells, adipose mesenchymal stem cells, RPTEC/TERT1 cells, dendritic cells, macrophages, B cells, mast cells, neutrophils, Kupffer-Browicz cells, PER.C6 cells, Induced pluripotent stem cells (iPSCs), or C2C12 cells. In some aspects, the producer cells are stem cells.

[0537] In some embodiments, producer cells can be genetically and/or pharmacologically modified to reduce gene and/or protein function in a cholesterol biosynthetic pathway, as described herein. In some aspects, modified producer cells can be further modified (e.g., genetically) to comprise exogenous sequences encoding a protein to produce EVs described herein. Genetically-modified producer cells can contain the exogenous sequence by transient or stable transformation. Nucleic acids encoding cargo polypeptides can be transformed as a plasmid. Nucleic acids encoding cargo polypeptides can be stably integrated into a genomic sequence of a producer cell, at a targeted site or in a random site. In some embodiments, a stable cell line is generated for production of lumen-engineered exosomes. In some embodiments modified producer cells comprise a recruiting polypeptide. In some embodiments, a recruiting polypeptide comprises a nucleic acid binding moiety. In some embodiments, a recruiting polypeptide comprises a membrane-associating moiety. In some embodiments, a recruiting polypeptide comprises a nucleic acid binding moiety and a membrane-associating moiety.

[0538] Nucleic acids encoding cargo polypeptides can be inserted into a genomic sequence of a producer cell, located within, upstream (5′-end) or downstream (3′-end) of an endogenous sequence encoding an exosome protein. Various methods known in the art can be used for the introduction of nucleic acids encoding cargo polypeptides into a producer cell. For example, cells modified using various gene editing methods (e.g., methods using a homologous recombination, transposon-mediated system, loxP-Cre system, CRISPR/Cas9 or TALEN) are within the scope of the present disclosure.

[0539] In some embodiments, the present disclosure provides a cell composition comprising modified cells that produce EVs, wherein modified cells have a reduced gene and/or protein function in a cholesterol biosynthetic pathway. In some embodiments, reduced gene and/or protein comprises protein in a cholesterol biosynthesis comprises one or more genes selected from 3-hydroxy-3-methylglutaryl-coenzyme A reductase (HMGCR), sterol regulatory element-binding protein 2 (SREBF2), Squalene epoxidase (SQLE), or 7-Dehydrocholesterol reductase (DHCR7) or a protein encoded by the gene.

[0540] In some embodiments, the present disclosure provides producer cells for use in the methods described herein. In some aspects, producer cells are prepared according to the methods described herein.

[0541] Also disclosed are methods for delivering a nucleic acid as described herein to a cell (e.g., a target cell). Methods may include contacting a cell with exosomes disclosed herein. Targeted exosomes may comprise a ligand at the N-terminus of a fusion protein that targets the exosomes to target cells. As such, a ligand may be present on the surface of the exosome where the ligand binds specifically to a receptor on the surface of the target cells. Cargo components may include a candidate therapeutic nucleic acid or a therapeutic nucleic acid for treating a disease or disorder when a cargo component is delivered to the target cells (e.g., a hybrid RNA comprising a miRNA, shRNA, mRNA, ncRNA, or any combination of any of these RNAs fused to the RNA-motif that binds to the RNA-binding domain of the fusion protein). Exosomes may be formulated as a pharmaceutical composition for treating the disease or disorder.

### VIII. Systems

i. Expression Systems

[0542] Numerous expression systems exist that comprise at least a part or all of the compositions discussed herein. Prokaryote- and/or eukaryote-based systems can be employed to produce nucleic acid sequences, or their cognate cargo polypeptides, proteins and peptides. For example, component components, barcode components, and related cargo polypeptides and peptide barcodes may utilize an expression system, such as an inducible or constitutive expression system. Many such systems are commercially and widely available.

[0543] For example, an insect cell/baculovirus system can produce a high level of protein expression of a heterologous nucleic acid segment, such as described in U.S. Pat. Nos. 5,871,986, 4,879,236, both herein incorporated by reference, and which can be bought, for example, under the name MAXBAC® 2.0 from INVITROGEN® and BACPACK™ BACULOVIRUS EXPRESSION SYSTEM FROM CLONTECH®.

[0544] In addition to the disclosed expression systems, other examples of expression systems include STRATAGENE®'s COMPLETE CONTROL Inducible Mammalian Expression System, which involves a synthetic ecdysone-inducible receptor, or its pET Expression System, an E. coli expression system. Another example of an inducible expression system is available from INVITROGEN®, which carries the T-REX™ (tetracycline-regulated expression) System, an inducible mammalian expression system that uses the full-length CMV promoter. INVITROGEN® also provides a yeast expression system called the Pichia methanolica Expression System, which is designed for high-level production of recombinant proteins in the methylotrophic yeast Pichia methanolica. One of skill in the art would know how to express a vector, such as an expression construct, to produce a nucleic acid sequence or its cognate polypeptide, protein, or peptide.

ii. Cells, Tissues, Organs, Organoids, Organisms

[0545] Among other things, the present disclosure provides for expression of cargo polypeptides in cells (e.g., eukaryotic cells, e.g., prokaryotic cells), tissues, organs, organoids, or organisms. In some embodiments, cells, tissues, organs, organoids, or organisms are mammalian cells, tissues, organs, organoids, or organisms. Nucleic acids, or cargo polypeptides encoded by nucleic acids, described herein may be comprised within a cell, tissue, organ, organoid, or organism. Nucleic acids may be in a eukaryotic cell, such as a mammalian cell or a plant cell. Mammalian cells, tissues, organs, organoids, or organisms may be of human, non-human primate, bovine, porcine, rodent or mouse origin. Cells, tissues, organs, organoids, or organisms may be of non-mammalian origin, such as poultry, fish, or shrimp.

[0546] A mammalian cell, tissue, organ, organoid, or organism may be of human or non-human mammalian origin, e.g., primate, bovine, ovine, porcine, canine, rodent, Leporidae such as monkey, cow, sheep, pig, dog, rabbit, rat or mouse. A cell, tissue, organ, organoid, or organism may be of non-mammalian origin such as poultry bird (e.g., chicken), vertebrate fish (e.g., salmon) or shellfish (e.g., oyster, clam, lobster, shrimp). A cell, tissue, organ, organoid, or organism may be or comprise a tumor cell, tissue, organ, or organoid. A cell, tissue, organ, or organoid may be or comprise a benign cell, tissue, organ, or organoid. A cell, tissue, organ, or organoid may be or comprise a kidney cell, tissue, organ, or organoid. A cell, tissue, organ, or organoid may be or comprise an adipose cell, tissue, organ, or organoid. A cell, tissue, organ, or organoid may be or comprise a brain cell, tissue, organ, or organoid. A cell, tissue, organ, or organoid may be or comprise a liver cell, tissue, organ, or organoid. A cell, tissue, organ, or organoid may be a blood cell, tissue, organ, or organoid. A cell, tissue, organ, or organoid may be or comprise a skin cell, tissue, organ, organoid, or organism. A cell, tissue, organ, or organoid may be or comprise a muscle cell, tissue, organ, or organoid. A cell, tissue, organ, or organoid may be or comprise a cardiac cell, tissue, organ, or organoid. A cell, tissue, organ, or organoid may be an ocular cell, tissue, organ, or organoid. A cell, tissue, organ, or organoid may be or comprise a nerve cell, tissue, organ, organoid, or organism. A cell, tissue, organ, or organoid may be a parenchyma cell, tissue, organ, or organoid. A cell, tissue, organ, or organoid may be or comprise an intestinal cell, tissue, organ, or organoid. A cell, tissue, organ, or organoid may be or comprise a lung cell, tissue, organ, or organoid. A cell, tissue, organ, or organoid may be or comprise an immune cell, tissue, organ, or organoid. Populations of cells may be or comprise one or more cells described herein, or any other cell type present in the tissue, organ, organoid or organism of interest.

[0547] As used herein, the terms “cell,” “cell line,” and “cell culture” may be used interchangeably. All of these terms also include their progeny, which is any and all subsequent generations. It is understood that all progeny may not be identical due to deliberate or inadvertent mutations. In the context of expressing a heterologous nucleic acid sequence, “host cell” refers to a prokaryotic or eukaryotic cell, and it includes any transformable organism that is capable of replicating a vector or expressing a heterologous gene encoded by a vector. A host cell can, and has been, used as a recipient for vectors or viruses. A host cell may be “transfected” or “transformed,” which refers to a process by which exogenous nucleic acid, such as a recombinant protein-encoding sequence, is transferred or introduced into the host cell. A transformed cell includes the primary subject cell and its progeny.

[0548] Some vectors may employ control sequences that allow it to be replicated and/or expressed in both prokaryotic and eukaryotic cells. One of skill in the art would further understand the conditions under which to incubate all of the above-described host cells to maintain them and to permit replication of a vector. Also understood and known are techniques and conditions that would allow large-scale production of vectors, as well as production of the nucleic acids encoded by vectors and their cognate polypeptides, proteins, or peptides.

### IX. Use

i. Assessing Cargos

[0549] Technologies described herein may be used to detect, assess, and/or characterize cargos (e.g., cargo polypeptides (e.g., variant cargo polypeptides); cargo nucleic acids (e.g., variant cargo nucleic acids)). In some embodiments, provided technologies may be used, for example, to assay cargos in complex environments (e.g., serum, blood, tissue, etc.). In some embodiments, cargos may be nucleic acids encoding cargo polypeptides. In some embodiments, cargos may be nucleic acids encoding candidate therapeutic polypeptides or therapeutic polypeptides.

[0550] As described herein, a cargo may be associated with a barcode (i.e., a barcoded cargo). In some embodiments, a barcoded cargo may be assayed using binding agents (e.g., phages with binders expressed on them) using methods as described herein. In some embodiments, a barcoded cargo may be captured (e.g., using affinity reagents) on a surface (e.g., beads or plates). In some embodiments, a barcoded cargo may be immobilized for barcode assaying. In some embodiments, a barcoded cargo is contacted with one or more binders and subject to decoding as described herein.

[0551] In some embodiments, cargos may be detected, assessed, and/or characterized in vitro. In some embodiments, cargos may be detected, assessed, and/or characterized in vivo.

[0552] In some embodiments, cargos that were previously detected, assessed, and/or characterized may be pooled together and subject to further detection, assessment, and/or characterization, for example, using methods as described herein. In some embodiments, such further detection, assessment, and/or characterization may be performed in vitro. In some embodiments, such further detection, assessment, and/or characterization may be performed in vivo.

[0553] In some embodiments, cargos that were previously detected, assessed, and/or characterized may be subject to mutagenesis (e.g., random mutagenesis, targeted mutagenesis, or using machine learning (e.g., pre-trainer large language model)). In some embodiments, for example, such mutated cargos (e.g., variant cargos (e.g., variant cargo nucleic acids, variant cargo polypeptides) may be pooled together and subject to further detection, assessment, and/or characterization, for example, using methods as described herein. FIG. 23 depicts a schematic of such an exemplary method. FIG. 23 shows that variants of a previously detected, assessed, and/or characterized cargo may be generated and subject to further detection, assessment, and/or characterization, for example, using methods as described herein. In some embodiments, such iterative methods, for example, could result in a variant cargo that for example shows improved or enhanced functionality (e.g., improved developability, expression, affinity, etc.). In some embodiments, such further detection, assessment, and/or characterization may be performed in vitro. In some embodiments, such further detection, assessment, and/or characterization may be performed in vivo.

[0554] In some embodiments, cargos may be disposed within one or more delivery particles as described herein.

[0555] For example, FIG. 17 depicts a schematic of an exemplary method that provides for high throughput cargo delivery, production, screening, identification, and/or characterization as described herein. In some embodiments, nucleic acids comprising (1) a cargo component whose nucleotide sequence is or comprises a sequence encoding a cargo polypeptide and (2) a barcode component whose nucleotide sequence is or comprises a sequence encoding a peptide barcode are disposed within one or more delivery particles and are administered to an animal (e.g., a mammal). In some embodiments, functional cargos are expressed in a tissue of interest, and decoding methods are used to determine cargos and/or delivery particles with desired properties.

[0556] In some embodiments, methods described herein determine simultaneous in vivo assessment of phenotypes of cargos in multiple tissues. In some embodiments, a phenotype includes biodistribution information related to cargos. In some embodiments, a phenotype includes pharmacokinetic (clearance) information of cargos. In some embodiments, a phenotype includes half-life information of cargos. In some embodiments, a phenotype includes tissue-mediated drug disposition (TMDD) of cargos. In some embodiments, a phenotype includes properties related to in vivo stability of cargos. In some embodiments, multiple phenotypes of cargos may be determined simultaneously.

[0557] In some embodiments, methods described herein determine simultaneous in vivo tracking and/or assessment and/or quantification of different cargos. In some embodiments, methods described herein determine simultaneous in vivo tracking and/or assessment and/or quantification of different types of delivery particles.

[0558] For example, FIG. 20 depicts a schematic showing that high-throughput screening using the delivery and assessment platform as described herein provides for screening of multiple cargos, formats, targets, and tissues simultaneously in different models (e.g., mouse, NHP, etc.).

ii. Assessing Shuttles

[0559] Technologies described herein may be used to detect, assess, and/or characterize shuttles (e.g., peptide shuttles (e.g., variant peptide shuttles); shuttle nucleic acids (e.g., variant shuttle nucleic acids), shuttle components (e.g., variant shuttle components)). For example, in some embodiments, technologies described herein may be used for the detection, assessment, and/or characterization of one or more shuttles (e.g., in a complex mixture (e.g., in vivo). In some embodiments, provided technologies may be used, for example, to assay shuttles in complex environments (e.g., serum, blood, tissue, etc.). That is, some embodiments, a shuttle agent (e.g., shuttles (e.g., peptide shuttles (e.g., variant peptide shuttles); shuttle nucleic acids (e.g., variant shuttle nucleic acids), shuttle components (e.g., variant shuttle components))) as described herein can be detected, assessed, and/or characterized similarly to how a cargo agent (e.g., cargos (e.g., cargo polypeptides (e.g., variant cargo polypeptides); cargo nucleic acids (e.g., variant cargo nucleic acids), cargo components (e.g., variant cargo components))) is detected, assessed, and/or characterized using technologies described herein.

[0560] As described herein, a shuttle may be associated with a barcode (i.e., a barcoded shuttle). In some embodiments, a barcoded shuttle may be assayed using binding agents (e.g., phages with binders expressed on them) using methods as described herein. In some embodiments, a barcoded shuttle may be captured (e.g., using affinity reagents) on a surface (e.g., beads or plates). In some embodiments, a barcoded shuttle may be immobilized for barcode assaying. In some embodiments, a barcoded shuttle is contacted with one or more binders and subject to decoding as described herein.

[0561] In some embodiments, shuttles may be detected, assessed, and/or characterized in vitro. In some embodiments, shuttles may be detected, assessed, and/or characterized in vivo.

[0562] In some embodiments, shuttles that were previously detected, assessed, and/or characterized may be pooled together and subjected to further detection, assessment, and/or characterization, for example, using methods as described herein. In some embodiments, such further detection, assessment, and/or characterization may be performed in vitro. In some embodiments, such further detection, assessment, and/or characterization may be performed in vivo.

[0563] In some embodiments, shuttles that were previously detected, assessed, and/or characterized may be subjected to mutagenesis (e.g., random mutagenesis, targeted mutagenesis, or using machine learning (e.g., pre-trainer large language model)). In some embodiments, for example, such mutated shuttles (e.g., variant shuttles (e.g., variant shuttle nucleic acids, variant shuttle polypeptides) may be pooled together and subjected to further detection, assessment, and/or characterization, for example, using methods as described herein. FIG. 31 depicts a schematic of such an exemplary method. FIG. 31 shows that variants of a previously detected, assessed, and/or characterized shuttle may be generated and subjected to further detection, assessment, and/or characterization, for example, using methods as described herein. In some embodiments, such iterative methods, for example, could result in a variant shuttle that, for example, shows improved or enhanced functionality (e.g., improved developability, expression, affinity, etc.). In some embodiments, a shuttle may comprise a structural feature (e.g., length, hydrophobicity, affinity, sequence motif, etc.) that has an effect (e.g., positive or negative) on cargo function. In some embodiments, such further detection, assessment, and/or characterization may be performed in vitro. In some embodiments, such further detection, assessment, and/or characterization may be performed in vivo.

[0564] In some embodiments, shuttles may be disposed within one or more delivery particles as described herein.

[0565] For example, FIG. 27 depicts a schematic of an exemplary method that provides for high throughput shuttle delivery, production, screening, identification, and/or characterization as described herein. FIG. 27 shows a schematic of an in vivo screen for TfR-targeted VHH shuttles in a humanized TfR mouse according to an embodiment described herein. In some embodiments, polypeptides comprising (1) a peptide shuttle and (2) a peptide barcode are administered to an animal (e.g., a mammal). In some embodiments, functional shuttles are delivered to a tissue of interest, and decoding methods are used to determine shuttles and/or delivery particles with desired properties. Alternately such delivery may also be achieved, in some embodiments, when nucleic acids comprising (1) a shuttle component whose nucleotide sequence is or comprises a sequence encoding a peptide shuttle, and (2) a barcode component whose nucleotide sequence is or comprises a sequence encoding a peptide barcode are disposed within one or more delivery particles and are administered to an animal (e.g., a mammal). In some embodiments, functional shuttles are expressed in a tissue of interest, and decoding methods are used to determine shuttles and/or delivery particles with desired properties.

[0566] In some embodiments, methods described herein determine simultaneous in vivo assessment of phenotypes of shuttles in multiple tissues. In some embodiments, a phenotype includes biodistribution information related to shuttles. In some embodiments, a phenotype includes pharmacokinetic (clearance) information of shuttles. In some embodiments, a phenotype includes half-life information of shuttles. In some embodiments, a phenotype includes tissue-mediated drug disposition (TMDD) of shuttles. In some embodiments, a phenotype includes properties related to in vivo stability of shuttles. In some embodiments, multiple phenotypes of shuttles may be determined simultaneously.

[0567] In some embodiments, methods described herein determine simultaneous in vivo tracking and/or assessment and/or quantification of different shuttles. In some embodiments, methods described herein determine simultaneous in vivo tracking and/or assessment and/or quantification of different types of delivery particles.

iii. Compositions

[0568] Among other things, the present disclosure provides compositions. In some embodiments, a composition comprises a nucleic acid as described herein. In some embodiments, a composition comprises one or more nucleic acids as described herein. In some embodiments, a composition comprises a plurality of nucleic acids as described herein. In some embodiments, when more than one construct is included in the composition, the nucleic acids are each different.

[0569] In some embodiments, a composition comprises a delivery particle as described herein. In some embodiments, a composition comprises one or more delivery particles as described herein. In some embodiments, a composition comprises a plurality of delivery particles. In some embodiments, when more than one delivery particle is included in the composition, the delivery particles are each different.

[0570] In some embodiments, a composition comprises an AAV delivery particle as described herein. In some embodiments, a composition comprises one or more AAV delivery particles as described herein. In some embodiments, a composition comprises a plurality of AAV delivery particles. In some embodiments, when more than one AAV delivery particle is included in the composition, the AAV delivery particles are each different.

[0571] In some embodiments, a composition comprises a barcode as described herein. In some embodiments, a composition comprises one or more barcodes as described herein. In some embodiments, a composition comprises a plurality of barcodes as described herein. In some embodiments, when more than one barcode is included in the composition, the barcodes are each different.

[0572] In some embodiments, a composition comprises a shuttle (e.g., peptide shuttle, shuttle component) as described herein. In some embodiments, a composition comprises one or more shuttles (e.g., peptide shuttles, shuttle components) as described herein. In some embodiments, a composition comprises a plurality of shuttles (e.g., peptide shuttles, shuttle components) as described herein. In some embodiments, when more than one shuttle (e.g., peptide shuttle, shuttle component) is included in the composition, the shuttles are each different. In some embodiments, when more than one shuttle (e.g., peptide shuttle, shuttle component) is included in the composition, the shuttles are all the same.

[0573] In some embodiments, a composition comprises a binder as described herein. In some embodiments, a composition comprises one or more binders as described herein. In some embodiments, a composition comprises a plurality of binders as described herein. In some embodiments, when more than one binder is included in the composition, the binders are each different.

[0574] In some embodiments, a composition comprises a binding agent as described herein. In some embodiments, a composition comprises one or more binding agents as described herein. In some embodiments, a composition comprises a plurality of binding agents as described herein. In some embodiments, when more than one binding agent is included in the composition, the binding agents are each different.

[0575] In some embodiments, a composition comprises a cargo polypeptide as described herein. In some embodiments, a composition comprises one or more cargo polypeptides as described herein. In some embodiments, a composition comprises a plurality of cargo polypeptides as described herein. In some embodiments, when more than one cargo polypeptide is included in the composition, the cargo polypeptides are each different. In some embodiments, when more than one cargo polypeptide is included in the composition, the cargo polypeptides are all the same.

[0576] In some embodiments, a composition comprises a shuttle-cargo as described herein. In some embodiments, a composition comprises one or more shuttle-cargos as described herein. In some embodiments, a composition comprises a plurality of shuttle-cargos as described herein. In some embodiments, when more than one shuttle-cargos is included in the composition, the shuttle-cargos are each different. In some embodiments, when more than one shuttle-cargos is included in the composition, the shuttle-cargos are all the same.

[0577] In some embodiments, a composition comprises a shuttle-cargo polypeptide as described herein. In some embodiments, a composition comprises one or more shuttle-cargo polypeptides as described herein. In some embodiments, a composition comprises a plurality of shuttle-cargo polypeptides as described herein. In some embodiments, when more than one shuttle-cargo polypeptide is included in the composition, the shuttle-cargo polypeptides are each different. In some embodiments, when more than one shuttle-cargo polypeptide is included in the composition, the shuttle-cargo polypeptides are all the same.

[0578] In some embodiments, a composition comprises a candidate therapeutic polypeptide or therapeutic polypeptide as described herein. In some embodiments, a composition comprises one or more candidate therapeutic polypeptides or therapeutic polypeptides as described herein. In some embodiments, a composition comprises a plurality of candidate therapeutic polypeptides or therapeutic polypeptides as described herein. In some embodiments, when more than one candidate therapeutic polypeptides or therapeutic polypeptides is included in the composition, the candidate therapeutic polypeptides or therapeutic polypeptides are each different.

[0579] In some embodiments, a composition is or comprises a pharmaceutical composition.

iv. Kits

[0580] Technologies as described herein may be provided in the form of a composition. For example, in some embodiments, a composition may comprise one or more elements (e.g., nucleic acid, amino acid, etc.) to produce or generate one or more barcodes and/or binders as described herein. In some embodiments, a composition may comprise one or more elements to produce or generate a set of barcodes. In some embodiments, a composition may comprise one or more elements to produce or generate a set of shuttles. In some embodiments, a composition may comprise one or more elements to produce or generate a set of binders. In some embodiments, a composition may comprise one or more elements to produce or generate a pool of barcode-binder pairs. In some embodiments, a composition may comprise one or more elements to produce or generate binding agents (e.g., phage expressing binders). In some embodiments, a composition may be a barcode composition. In some embodiments, a composition may be a shuttle composition. In some embodiments, a composition may be a shuttle-cargo composition. In some embodiments, a composition may be a shuttle-cargo polypeptide composition. In some embodiments, a composition may be a binder composition. In some embodiments, a composition may be a barcode-binder composition. In some embodiments, a composition may be a binding agent composition. In some embodiments, a composition may comprise one or more of barcodes, shuttles, binders, binding agents, and/or components thereof. In some embodiments, a composition may comprise one or more sets/pools of barcodes, shuttles, binders, binding agents, and/or components thereof.

[0581] Provided herein are compositions comprising nucleic acids, delivery particles, barcodes, shuttles, binders, binding agents, therapeutic agents, cargos, shuttle-cargos, polypeptides (e.g., cargo polypeptides, shuttle-cargo polypeptides, therapeutic polypeptides, etc.), or components thereof. In some embodiments, a composition comprises nucleic acids, delivery particles, barcodes, shuttles binders, binding agents, therapeutic agents, cargos, shuttle-cargos, polypeptides (e.g., cargo polypeptides, shuttle-cargo polypeptides, therapeutic polypeptides, etc.), components thereof and/or combinations thereof, which have been assessed, identified, characterized or assayed using methods as described herein. In some embodiments, a composition provided herein comprises one or more, two or more, three or more, four or more, five or more, six or more, seven or more, eight or more, nine or more, or ten or more nucleic acids, delivery particles, barcodes, shuttles, binders, binding agents, therapeutic agents, cargos, shuttle-cargos, polypeptides (e.g., cargo polypeptides, shuttle-cargo polypeptides, therapeutic polypeptides, etc.), components thereof and/or combinations thereof, which have been assessed, identified, characterized or assayed using methods as described herein.

[0582] In some embodiments, a composition provided herein comprises two or more, three or more, four or more, five or more, six or more, seven or more, eight or more, nine or more, or ten or more nucleic acid sequences or amino acid sequences as listed in Table 1, Table 2, Table 3, Table 4, Table 5, Table 6, or Table 7.

[0583] A composition as described herein may be formulated in various forms. For example, in some embodiments, a composition as described herein may be formulated in a powder form (e.g., lyophilized). In some embodiments, a composition as described herein may be formulated in a liquid form.

[0584] In some embodiments, compositions for use in accordance with the present disclosure are pharmaceutical compositions, e.g., for administration (e.g., topical, oral, subcutaneous, intravenous, intramuscular, intracerebral, intrathecal, rectal (e.g., rectal intubation), opthalmical, intravitreal, or suprachoroidal administration) to a subject (e.g., a mammal (e.g., a human)). In some embodiments, such compositions are administered to a subject to detect, characterize, and/or assess one or more attributes of one or more cargos administered or to be administered to the subject. Pharmaceutical compositions typically include an agent to be administered (e.g., nucleic acids, delivery particles, barcodes, shuttles, binders, binding agents, therapeutic agents, cargos, shuttle-cargos, polypeptides (e.g., cargo polypeptides, shuttle-cargo polypeptides, therapeutic polypeptides, etc.), and/or components thereof), and a pharmaceutically acceptable carrier. Certain exemplary pharmaceutically acceptable carriers include, for instance saline, solvents, dispersion media, coatings, antibacterial and antifungal agents, isotonic and absorption delaying agents, and the like, compatible with pharmaceutical administration. Pharmaceutical compositions are typically formulated to be compatible with its intended route of administration. Examples of routes of administration include topical, oral, subcutaneous, intravenous, intramuscular, intracerebral, intrathecal, rectal, (e.g., rectal intubation), opthalmical, intravitreal, or suprachoroidal administration.

[0585] In some embodiments, pharmaceutically compatible binding agents, and/or adjuvant materials can be included as part of a pharmaceutical composition. In some particular embodiments, a pharmaceutical composition can contain, e.g., any one or more of the following inactive ingredients, or compounds of a similar nature: a binder, an excipient, a lubricant, a glidant, or some similar such compound.

[0586] Compositions can be included in a kit, container, pack, or dispenser, together with instructions for administration (e.g., to a subject) or for use in a method described herein. In some embodiments, instructions may include methods to reconstitute a powder form composition to a liquid form composition for further use. In some embodiments, a kit may include instructions that allows a user to generate new set of binders for a new set of barcodes. In some embodiments, a kit comprises a set of instructions to perform sequencing of one or more phage particles bound to one or more barcodes.

[0587] In some embodiments, a kit comprises information designating peptide barcodes for each binder. In some embodiments, a kit comprises a computer readable program for decoding sequencing data.

[0588] In some embodiments, a kit comprises reagents to express a binder on a phage particle. In some embodiments, a kit comprises nucleic acids that encode one or more barcodes. In some embodiments, a kit comprises nucleic acids that encode one or more binders. In some embodiments, a kit comprises nucleic acids that encode one or more shuttles (e.g., shuttle component).

[0589] Those skilled in the art, reading the present disclosure, will appreciate that, in some embodiments, a composition (e.g., a nucleic acid composition, a delivery particle composition, a binder composition, a barcode composition, a shuttle composition, a shuttle-cargo composition, a binding agent composition, a polypeptide composition (e.g., a cargo polypeptide composition, a shuttle-cargo polypeptide composition, a therapeutic polypeptide composition), etc.) as described herein may be or comprise one or more cells, tissues, or organisms (e.g., plant or microbe cells, tissues, virus, or organisms) that produce (e.g., have produced, and/or are producing) a relevant binder, barcode, shuttle, shuttle-cargo, binding agent, and/or polypeptide (e.g., a cargo polypeptide, a shuttle-cargo polypeptide composition, a therapeutic polypeptide) as described herein.

[0590] Those skilled in the art will appreciate that, in some embodiments, technologies for preparing compositions and/or preparations, and/or for preparing (and particularly for preparing pharmaceutical compositions) may include one or more steps of assessing or characterizing a compound, preparation, or composition, e.g., as part of quality control. In some embodiments, if an assayed material does not meet pre-determined specifications for the relevant assessment, it is discarded. In some embodiments, if such assayed material does meet the pre-determined specifications, then it continues to be processed as described herein.

[0591] In some embodiments, a composition is tailored to a specific subject (e.g., a specific mammal, e.g., a patient). In some embodiments, a composition is specific for a cargo to be assessed for an individual subject (e.g., mammal (e.g., human, mouse, etc.)). In some embodiments, a composition is specific for cargos to be assessed for an individual subject (e.g., mammal (e.g., human, mouse)). In some embodiments, a composition is specific for cargos of a population of subjects (e.g., mammals (e.g., humans, mice, etc.)). Populations of subjects can include, but are not limited to: families, subjects in the same regional location (e.g., neighborhood, city, state, or country), subjects with the same disease or condition, subjects of a particular age or age range, subjects that consume a particular diet (e.g., food, food source, or caloric intake).

### EXEMPLIFICATION

### Example 1: Identification of Barcodes, Corresponding Binding Agents, and Determining Fingerprints

[0592] The present Example demonstrates methods for identifying barcodes, corresponding binding agents (e.g., binders expressed on binding agents), and determining fingerprints (e.g., barcode fingerprints) and using the information to determine the proportion of a barcode in a given mixture. The resulting materials can then be used to measure and quantify different cargos.

### Design and Synthesis of a Barcode Library:

[0593] Barcode sequences were designed which contain specific sequence motifs thought to fold into a given helical or loop structure. All sequences from the Protein Data Bank (PDB) were downloaded, along with their corresponding secondary structure predictions. Sequences were selected and subsetted from the full sequence if they met the criteria of: being a contiguous helix or loop sequence for a length of 8-25 amino acids. A random subset of 100,000 of the peptide sequences matching this criteria were then ordered as an oligo pool, containing constant overhangs and type US sites for cloning into a vector (see FIG. 1B).

Cloning Barcode Library into Expression Plasmid:

[0594] The designed pool of barcodes was cloned into a pET expression vector to yield a barcode attached to a cargo protein. A plasmid was constructed containing 6×HIS-HALO-TEV-LN-IIS-LC, allowing for direct cloning of the oligo pool via golden gate assembly. LN and LC represent the constant overhangs in the oligo pool used for ligation (FIG. 1B). 1 μg of vector was predigested with BsaI at 37° C. and purified. Oligo pools were amplified via Polymerase Chain Reaction (PCR). A 1:10 molar ratio of purified vector and insert were added to a golden gate assembly reaction using NEB golden gate assembly mix (Cat: E1601S), and incubated at 37° C. for 1 hour, then heat killed at 70° C. for 5 min. This material was then purified, drop dialyzed into pure H₂O for 60 min, and electroporated into electrocompetent BL21 bacteria (lucigen). Serial dilution were plated to recover individual colonies. Colonies were then picked, grown in media containing 1% glycerol and 100 μg/ml carbenicillin, and glycerol stocked in 20% glycerol at −80° C. After cloning, a construct is generated containing a barcode attached to a protein using a linker (FIG. 1A).

### Expression of Individual Barcodes:

[0595] Expression was performed either using in vitro transcription translation (IVTT) or BL21 induction. For IVTT, PCR was performed directly from glycerol stock by adding primers specific for T7 and T7 terminator sequences in BL21. The resulting amplicon contains T7 and T7 terminator for expression, and makes the protein 8×HIS-HALO-TEV-LN-Barcode-LC. 1 μL of PCR product, containing approximately 50 ng of DNA was added to a 10 μL IVTT reaction using NEBPure (cat no: E6800S) assembled according to the manufacturer's instructions. The reaction was then incubated for 4 hours at 37° C. For Escherichia coli (E. coli) expression, cultures were grown to an OD of 0.5 at 37° C., then induced using Isopropyl β-d-1-thiogalactopyranoside (IPTG) and grown overnight at 25° C. Cells were lysed the next day using sonication in the lysis buffer, and the lysed material separated from the inclusion bodies via centrifugation, taking the supernatant containing protein. Supernatant was purified using affinity chromatography Ni-NTA resin and stored for future use.

### Capture of Individual Barcodes on HALO Magnetic Beads:

[0596] 10 μL of WITT was diluted to 50 μL in PBS supplemented with BSA at 1 mg/ml. To this mixture, 30 μL of Halo tag magnetic beads (cat: G7281) were added, and incubated with shaking at 400 rpm for 2 hours, then 4° C. with shaking overnight. Beads were captured on magnetic stand, and the supernatant removed. The beads were then washed 2× with PBS-T with 0.1% Tween 20 (PBS-T). A schematic of a captured barcode is shown in FIG. 3B.

Construction of a Phage Display Library Containing Binders with Varying Affinities to Barcodes:

[0597] Binders with strong affinities to at least one barcode were generated via methods known to those skilled in the art (e.g., phage display, hybridoma, etc.). These binders were then displayed on phage as scFv fragments fused to m13 gene 3 protein (g3). Briefly, oligos containing the scFv binding sequences were generated via DNA synthesis. The oligo were cloned into a plasmid containing the constant regions of the scFv connected to G3 via a G4S linker (SEQ ID NO.: 9060) and myc tag. 30 μg of the library was electroporated into TG1 (lucigen) and plated on several 25 mm plates containing carbenecllin at 100 μg/ml and glucose 1%. Dilutions of electroporation were plated for diversity analysis. The Q trays were scraped and glycerol stocked. To produce phage, a 2 L culture was inoculated at ˜OD 0.05 and grown to OD 0.5 at 37° C. with 100 μg/ml carbenicillin and 1% glycerol. At OD 0.5, helper phage was added at a 10:1 phage:cell ratio, and incubated with shaking at 250 rpm. After 1 hour, shaking was reduced to 150 rpm and temperature to 30° C., and incubated overnight. The next day, phage was prepared via PEG precipitation (Barbas et al. 2001), resuspended in 10 mL, and titered. Phage was stored at 4° C. until use.

### Assessment of Phage-Binder-Barcode Interaction:

[0598] 10 μL of the phage library prepared using methods described above was added to the captured barcode and incubated at room temperature for 2 hours, to allow binding of the phage to the barcode (FIG. 3C). After incubation, the mixture was washed by successive transfers of the magnetic beads to fresh PBS-T 3 times. Phage were eluted from beads by resuspension in PBS containing TEV protease+0.1% DTT and incubation at 37° C. for 30 min. Beads were collected on a magnetic stand, and the supernatant collected. To the supernatant, trypsin was added and further incubated for 30 min. To propagate phage, the supernatant was added to 50 mL of TG1 E. coli grown at 37° C. to an OD of 0.5 in 2×YT and incubated with shaking at 37° C. for 1 hour. Then 100 μg/ml carbenicillin and 1% glucose were added with incubation under the same conditions for 1 hr. Helper phage (cat: PH050L) was added and further incubated for 1 hour at 37° C. The culture was centrifuged and placed into new media containing 100 μg/ml carbenicillin and 50 μg/ml kanamycin, and incubated overnight at 30° C. Following this, centrifugation at 4000 g for 20 minutes was performed, and the supernatant containing phage was collected.

### Analysis and Establishment of a Fingerprint for a Given Barcode:

[0599] After selection was performed from the original phage pool against each barcode individually, phage-scfv (i.e., phage-binder) selectivity was analyzed via NGS. Phage were lysed via heating at 98° C. for 10 minutes, and the resulting genomes were PCRed using primers which flank the CDR regions of both the heavy CDR3 (5 prime) and light chain CDR3 (3 prime). A second round of PCR was performed to add required illumina sequences (i5/i7, sequencing primer binding region) for NGS. The result DNA was pooled, quantified and subject to NGS using an Illumina instrument. This process is shown in FIG. 2 and FIGS. 3A-3C.

[0600] NGS reads are demultiplexed using the illumina software bcl-convert, such that each final .fastq contains the DNA sequences from a given phage CDR3 pair which correspond to the output from a given barcode well. The corresponding CDR3 sequences are then counted using a computer program, revealing the distribution of binders present for a given barcode. The fingerprint of a barcode corresponds to the vector of counts for each scFv binder within the given pool. Each fingerprint is the median of n=3 individual barcode replicates. The process and resulting fingerprint for a single barcode using the pool of phage binders is shown in FIG. 4.

### Determination of Proportion of Barcodes in a Given Mixture Using a Fingerprint Matrix:

[0601] Once the fingerprints of each barcode of a set of barcodes have been determined, the proportions of barcodes in an unknown sample were measured in the following manner. The binder-barcode interactions were assessed as described above, and the resulting NGS readout was fit to a linear combination of the known fingerprints via least squares. That is, the coefficients of the linear combination are chosen by minimizing the sum of squares of the differences between the measured NGS count and the expected NGS count for all binding species as described in Example 8. The expected NGS count is given by the matrix product of the fingerprint matrix with a set of barcode abundance coefficients. Once the coefficients have been obtained, they are normalized to sum to 1 to obtain proportions.

### Decoding of Equal Proportion Barcode Mixture to Assess Fingerprint Scaling:

[0602] In order to determine any scaling issues that may arise due to varying affinities between binders and barcodes, a scaling factor is generated via a measurement of barcodes mixed in equal proportions. Briefly, all barcodes validated are mixed at even concentrations after production. Phage binder interactions were assessed as described above, and the resulting phage was subject to NGS. Using the fingerprints determined for individual barcodes above, the proportion of barcodes in the mixture was estimated via least squares regression as described in Example 8. The proportions predicted using the least squares form the basis for scaling factors (sf) where sf=1/p, where p=proportion predicted. The process is described in FIG. 5.

### Assessment of Mixtures of Barcodes of Known Proportions:

[0603] Barcodes produced above were mixed at known proportions and subject to assessment to determine their accuracy. Barcodes were mixed at different proportions (FIG. 6A), and then analysis of phage binder (i.e., binding agent) interactions was performed as described above. The NGS counts for each binder within the pool were counted. Least squares was used to determine the proportion of barcodes given the fingerprint constructed above using single barcodes. Predictions from the least squares analysis were then rescaled using the established scaling factor by p′=p*sf, where p′ is the new prediction, p is the original prediction and sf is the established scaling factor. The new predictions are then re-normalized to sum to 1.

[0604] FIG. 6B shows the accuracy of proportion measurement for this method. Six (6) different barcodes were measured, normalized via a scaling factor, and relative barcode proportions were estimated with a global pearson correlation of 0.95 across all measurements made. Measurements were across a 100-fold gradient of barcodes. FIG. 6C shows a plot of NGS count values, normalized to counts per million, for each single barcode measurement as well as mixture that were used to predict the relative abundance of each barcode within the mixture. Rows are experiments, thus all values in a row are generated from a single .fastq file and columns are binding agents.

### Example 2: In Vitro Detection of a Cargo in a Mixture Using Binder-Barcode Platform

[0605] The present example demonstrates a method of measuring the presence or absence of a given cargo in a mixture using a binder-barcode platform as described herein.

[0606] Barcodes generated in Example 1 were transferred onto a unique cargo using DNA cloning. Briefly, barcodes were amplified out of the pET 6×HIS-HALO-TEV-LN-Barcode-LC such that the LN-Barcode-LC part is amplified. The barcode insert was cloned using gibson into a new pET vector containing 6×HIS-Cargo-LN-Barcode-LC, where cargo was a unique protein of interest. Cargo-barcodes were produced in E. coli as described above. Barcoded cargo proteins are then purified via affinity chromatography using Ni NTA, washed in 500 mM NaCl, 50 mM Tris-HCl, 50 mM imidazole, and eluted using 500 mM imidazole. Barcoded cargo proteins were then subject to decoding using the phage binder library described in Example 1. FIGS. 6, 9, and 12 show experimental setups to detect cargo using barcodes previously generated in a different context, and results of such experiments thus showing these barcodes contain generalized detection properties across varying numbers of barcodes within a pool.

[0607] In the experiment described in FIG. 9, six unique barcodes (BC1, BC2, BC3, BC4, BC5, and BC6) were mixed at known proportions, contacted with binding agents, and subjected to decoding as described herein (FIG. 9A). Two barcodes were experimentally held out as negative controls, but prediction for these barcodes was allowed, thus allowing determination of background prediction. FIGS. 9B and 9C show data on accuracy of decoding procedure across a 10-fold range of concentrations for the 6 unique barcodes. FIG. 9B shows plot of actual data (input) and measured data obtained after decoding for one mixture of known barcode concentrations. Input known concentrations (left bar) are shown next to predictions/measured data (right bar) for each barcode across 3 replicates. FIG. 9C shows plots of actual data (input) and measured data obtained after decoding for five different mixtures (i.e., pools 1-5) of known barcode concentrations. Input known concentrations (left bar) are shown next to predictions/measured data (right bar) for each barcode across 3 replicates.

[0608] In the experiment described in FIG. 12, the quantification of twenty-four (24) barcodes contained within a single mixture was determined. FIG. 12A shows a graphical depiction of the experiment. Of 24 total barcodes the algorithm can predict, 10 were present within a mixture at equal concentrations. The rest were held out from the pool, but prediction was computationally allowed. Three (3) separate pools, which cover all possible barcodes were measured in replicate. These pools were mixed, then captured on HALO beads, described in Example 1. The immobilized barcoded cargo was then contacted with a pool of binding agents (i.e., binding agents with binders expressed on them), and decoded to CDR3 sequence counts as described in Example 1. The CDR3 sequence counts, determined via NGS, were then utilized to determine the presence and total concentration of each barcoded cargo in the sample via decoding (see Example 8). FIG. 12B shows prediction for the first pool; the input concentration (left bar) and measured concentration (right bar) are plotted for each barcode in the pool. FIG. 12C plots predictions for each of the three pools. As in FIG. 12B, the bar graphs plot input concentration on the left and measured concentration on the right. FIG. 12D shows the barcode fingerprint for each of the 24 barcodes used to computationally determine the relative abundance of the barcodes within each of the 3 pools. Columns represent barcode fingerprints, and rows represent binding agent fingerprints. FIG. 12E shows the binding agent counts from the three pools, used to computationally determine the proportion of the pools. Rows are the binding agent counts, columns are the pools, and each cell is the binding agent count within a specific pool.

### Example 3: In Vitro Assessment of Cargo Stability within a Pool of Cargos Using Binder-Barcode Platform

[0609] The present example demonstrates a method to determine the general aggregative tendencies of several cargos in a pool using barcode decoding.

[0610] A purified pool of barcoded cargos is generated using the method described in Example 2. The purified pool is then subject to size exclusion chromatography using standard methods. Different fractions are collected—corresponding to monomeric vs aggregated cargos. The general presence or absence of a given barcoded cargo within the purified pool is not known. The separated fractions, containing an unknown abundance of each barcoded cargo, are then immobilized on beads or immunosorbent assay plates, contacted with a pool of binders (i.e., binding agents with binders expressed on them), and decoded to CDR3 sequence counts as described in Example 1. The CDR3 sequence counts, determined via NGS, are then utilized to determine the presence and total concentration of barcoded cargos in each fraction. The concentration of barcoded cargos in the different fractions are then compared to determine the percent of each barcoded cargo which is monomeric vs aggregated within the purified pool.

### Example 4: In Vivo Assessment of Cargo Pharmacokinetics within a Pool of Cargos Using Binder-Barcode Platform

[0611] The present example demonstrates a method to determine the overall residence and clearance time of a given cargo, contained within a pool of cargos, using a mouse model, as demonstrated in FIG. 11.

[0612] Three pools of barcoded cargos were injected into three different groups (pool 1 into group 1; pool 2 into group 2, and pool 3 into group 3) of mice (n=3). Pool one contained a single barcoded antibody at 10 mg/kg. Pool two contained two barcoded antibodies pooled at equal concentrations and injected at 20 mg/kg. Pool three contained PBS only. Injection volumes were held constant at 100 μL per pool. At 24 hours after injection, blood was collected from each mouse and serum separated. 10 μL of serum was diluted 1:10 in PBS and captured using anti-human IgG magnetic beads (Ray biotech cat #801-101-1) by incubation overnight at 4° C. with mixing at 700 rpm. The immobilized barcoded cargos were washed using PBS-T three (3×) times, to remove all serum proteins not associated with the affinity reagent. The immobilized barcoded cargo was then contacted with a pool of binding agents (i.e., binding agents with binders expressed on them), and decoded to CDR3 sequence counts as described in Example 1. The CDR3 sequence counts, determined via NGS, were then utilized to determine the presence and total concentration of each barcoded cargo in the sample via decoding (see Example 8). The proportion of barcoded cargos measured at 24 hours was compared to the injected concentration to determine the relative rate of clearance for each barcoded cargo from the organism. In each of the groups, only the injected barcoded antibody was detected by decoding as evidenced by the graph plotted in FIG. 11, with high accuracy. In group 2 mice, which were injected with pool 2 that contains both antibodies at equal concentrations, slightly differing amounts are measured via decoding in the serum at 24 hours. It is hypothesized that this difference is due to differences in clearance rates between the two barcoded antibodies. As expected, the control group showed almost no antibody.

### Example 5: In Vivo Assessment of Cargo Biodistribution Using Binder-Barcode Platform

[0613] The present example demonstrates a method to determine the overall distribution of a barcoded cargo across a diverse set of tissues using a mouse model.

[0614] A pool of purified cargos is injected intravenously into a BALB-6 mouse. After at least 24 hours, different tissue samples, such as liver, lung, and brain, are taken from the organism. The tissues are then processed into a single-cell suspension via vigorous shaking with beads. The suspension is then lysed using a lysis buffer to liberate the barcoded cargos (e.g., barcoded cargo polypeptides) contained within the tissues. The lysed suspension is then purified using a universal tag affinity reagent contained within the cargos to separate the barcoded cargos. Purified barcoded cargos are then immobilized, and barcode decoding is performed according to method described in Example 1. The CDR3 sequence counts, determined via NGS, are then utilized to determine the presence and total concentration of each barcoded cargo in each sample. Cargo abundance across different tissue samples is then compared, to determine the percent of each cargo which is contained within each tissue. This data may then be used to select the best cargo with specific biodistribution properties.

### Example 6: In Vitro Demonstration of Recovering Known Mixture of Unmodified Antibodies

[0615] The present example demonstrates how a known mixture of antibody proteins with no barcode attached was quantified using the protein quantitation invention described herein.

[0616] Briefly, scFv binders to the antibodies were generated using methods known to those skilled in the art. The binder were then cloned and displayed on phage as described in Example 1. The two antibodies of interest were expressed in CHO cells and purified from the media using Protein A affinity chromatography. Antibodies were mixed together in known proportions (FIG. 7A). Antibodies were then captured using 50 μL anti-Human Fc magnetic beads and incubated in PBS. The antibodies were then subject to phage assessment as described in Example 1, and the relative abundance of each antibody estimated using the algorithm described in Example 8. An accuracy of pearson 0.96 at determining the relative concentration of these two antibodies in varying proportion mixtures was calculated (FIG. 7B).

### Example 7: In Vitro Demonstration of Recovering Known Mixture of Antibodies in Presence of Serum

[0617] The present example demonstrates how a known mixture of antibody proteins with barcodes contained within internal regions of the protein sequences was quantified in mouse serum using the protein quantitation technology described herein.

[0618] Briefly, antibodies were produced as described in Example 6, and a similar experiment was performed, except after production, the antibodies were mixed with mouse serum, incubated at 37° C. for 30 minutes, and then captured using anti-Fc magnetic beads (FIG. 8A). The immobilized barcoded antibodies were then contacted with a pool of binding agents (i.e., binding agents with binders expressed on them), and decoded to CDR3 sequence counts as described in Example 1. The CDR3 sequence counts, determined via NGS, were then utilized to determine the presence and total concentration of each barcoded antibodies in the sample via decoding (Example 8). The relative concentration of three antibodies was estimated with a spearman of 0.926 across 3 mixtures of antibody concentration as shown in FIG. 8B and FIG. 8C. These results show the ability using technologies described herein to rank the antibodies present in a sample with high accuracy after incubation with serum i.e., in a complex environment.

### Example 8: Detailed Description of the Decoding Algorithm Used to Infer Barcode Abundance

### Method of Inferring Barcode Amounts:

[0619] Before decoding an unknown sample, a set of barcodes and its interaction with a binder pool (i.e., phage binder pool) must first be characterized. This is done by decoding a set of known samples under known conditions. The binder pool and experimental conditions is held fixed between all samples.

[0620] To characterize a set of barcodes, we measure a set of fingerprints, one for each barcode. A fingerprint represents the ideal readout of an individual barcode. Roughly speaking, it is the spectrum of affinities between a given barcode and all the binder species in the pool. A fingerprint can be estimated by decoding multiple identical samples containing purely one barcode, averaging together the readouts of the replicates, and rescaling accordingly. Alternatively, fingerprints can be learned by decoding samples containing known mixtures of barcodes and deconvoluting appropriately to isolate individual fingerprints. Together, the fingerprints of a set of barcodes is known as a “fingerprint matrix”.

[0621] Once the fingerprint matrix of a set of barcodes is determined, it can be used to infer the barcode composition in an unknown sample. The decoding algorithm accomplishes this by fitting the readout of the unknown sample to a linear combination of fingerprints. This is described in further detail in the algorithmic section described herein. A key assumption of the algorithm is that the decoding process is linear: if a sample contains two barcodes mixed in equal proportions, it is assumed that its readout is equal to the sum of the fingerprints of the two barcodes (plus noise). More generally, the readout of a mixture of barcodes is assumed to be the sum of the fingerprints of each barcode, appropriately weighted by its prevalence in the mixture. This assumption has empirically been found to be true.

[0622] The task of barcode quantification has varying levels of difficulty. From easiest to hardest, these include:
[0623] Binary classification: detecting the presence or absence of a barcode in a sample
[0624] Rank-order quantification: ranking barcodes from most to least prevalent in a sample
[0625] Relative quantification: determining the ratios between barcodes in a sample
[0626] Absolute quantification: determining the absolute amount of each barcode in a sample

[0627] In this Example, absolute quantification is discussed in further detail.

### Mathematical Model of Decoding:

[0628] The decoding process can be represented with the following mathematical model, where:
[0629] x is a length-n vector representing the input sample and each entry is the amount of a barcode species in units of ng; y is a length-m vector representing the bound binder fraction and each entry is the number of particles of a binder species in units of pfu; z is a length-m vector representing the NGS readout and each entry is the number of counts for a binder species.

[0630] The bound binder fraction is modelled as a linear combination of fingerprints, and the NGS readout is modelled as multiplying the bound binder fraction by a conversion factor:

$${y}_{j} = {\sum }_{i = 1}^{n} {A}_{ji} {x}_{i} + {ϵ}_{1}$$

$${z}_{j} = {s}_{j} {y}_{j} + {ϵ}_{2}$$

[0631] where Aⱼᵢ is the fingerprint matrix, an m by n matrix with units of pfu bound per ng of barcode. The ‘ji’ entry represents the propensity for barcode i to bind binder j in the binder pool; sⱼ is the conversion factor between pfu bound and number of NGS reads for binder species j; ε₁ is noise associated with the binding steps; ε₂ is noise associated with the post-binding steps.

[0632] The model assumes that binding between barcodes and binders is linear. In other words, if a sample contains a mixture of barcodes, its readout is assumed to be equal to the sum of the fingerprints of the individual barcodes, weighted by the relative barcode abundances. In Appendix A we provide a detailed biophysical model which justifies the linear assumption under one key condition: the amount of available binder cannot be significantly depleted by binding to the barcodes in the sample. Thus, as in typical immunoassays, the binding agent must be in excess and cannot be the limiting reagent.

### Fingerprint Matrix Aⱼᵢ:

[0633] Each column of the mn-fingerprint matrix is a fingerprint. Each fingerprint represents the ideal, properly normalized readout of a pure barcode. The entry Aⱼᵢ represents the contribution of the j'th binder to the fingerprint of barcode i.

[0634] The fingerprint of a barcode depends on the binding affinity to all the binders in the pool as well as the relative abundance of each binder species in the pool. Furthermore, the fingerprint is sensitive to the binding, equilibration, and elution steps. In the simplest case, the fingerprint matrix is given by

$${A}_{ji} = {d}_{j} / {K}_{ji}$$

where dⱼ is the concentration of binder j in the binder pool, and Kⱼᵢ is the dissociation constant of the complex between barcode i and binder j (see Appendix A). In more complicated cases, A, could also include effects of adhesion to surfaces, unbinding during washing steps, etc.

[0635] The matrix product of A with a barcode mixture x gives the composition of the ideal bound binder fraction (i.e., in absence of noise), in units of number of phage particles.

[0636] The fingerprint matrix can be determined from measuring the readout of multiple known samples. Multiple replicates are performed to average over noise. In addition, the fingerprints are properly scaled, either with respect to one another or to an absolute standard (see the Normalization section).

### Conversion Factors sⱼ:

[0637] The post-binding steps introduce a conversion factor between the number of bound phage particles to the number of NGS reads. This is represented by sⱼ. In the simplest case, sⱼ is identical for all binder species and represents an overall normalization,

$$s = C / {\sum }_{j = 1}^{m} {y}_{j}$$

such that the total number of reads/counts is C. This models the situation where there is some sort of bottleneck in the processing, such as saturation of the propagation culture, such that the end result is a fixed number of reads, irrespective of the amount of bound phage. In a more complicated case, sⱼ could depend on the binder species, reflecting amplification bias or differential phage fitness in propagation.

[0638] In the case where the conversion factor is identical for all binder species, it is a single number which must be determined on a sample-by-sample basis. This can be done by using a DNA sequence spiked in at some point of the process (as described herein).

### Noise ε:

[0639] Noise sources are represented by the terms ε₁ and ε₂. In the absolute simplest case, ε₁ is absent and is ε₂ is Gaussian noise of fixed variance, in which case prediction can be done with ordinary least-squares regression. In reality, the noise arises from multiple, non-Gaussian sources, as detailed in the sections above. These include log-normal noise involved with exponential steps, such as phage propagation and PCR amplification, Poisson noise due to finite sequencing depth (and possibly stochasticity in binding/elution at low concentrations), and Gaussian noise from all sorts of other processes, such as sample degradation, etc.

Conversion from Read Counts to Phage Counts:

[0640] One feature of the NGS is that the readout is a relative measurement: it gives the ratio of abundances between different binder species, but not necessarily the absolute concentrations of binder species. To obtain an absolute readout, the raw readout must be divided by a conversion factor between the number of phage particles bound and the NGS read count.

[0641] Without knowing the conversion factor, it is only possible to determine the relative abundances of barcode in a sample (i.e., proportions). Absolute quantification requires a reference of known concentration (either barcode or binder) to be spiked into the process.

### Methods of Absolute Quantification:

Spiking a Phage Ladder into Eluate:

[0642] One method of normalizing is to add a unique binder species into the eluate at a known concentration, yₛₚᵢₖₑ₋ᵢₙ. This reference species should be distinct from the existing binders in the pool. In the subsequent steps (where the eluted phage are propagated, DNA extracted, PCR'ed, and sequenced), the reference phage will be amplified by (ideally) the same factor as the other phage in the pool, i.e.,

$${z}_{spike - in} = s \cdot {y}_{spike - in}$$

[0643] The conversion factor can be estimated by dividing the number of reads corresponding to the reference phage by the (known) concentration at which it was added, i.e.,

$$\hat{s} = {y}_{spike - in} / {z}_{spike - in}$$

[0644] A generalization is to spike multiple binder species into the eluate. Each reference species can be spiked in at a different concentration. If the concentrations are evenly spaced, this forms a “phage ladder”, in analogy with ladders used in gel electrophoresis. To estimate the conversion factor, the number of reads of each reference sequence can be compared to the (known) concentration at which it was added to the eluate. Averaging across the species then yields a more precise estimate of the conversion factor.

Spiking Barcode into Sample:

[0645] Alternatively, a reference barcode of known concentration can be added to the sample at the beginning of the decoding process. This reference barcode should be distinct from the existing barcodes in the sample. The decoding algorithm can use the raw readout to determine the proportions of all barcodes within the sample, including the reference and the sample barcodes. By dividing the reference barcode concentration by its predicted proportion, a barcode conversion factor can be determined. Multiplying all the predicted proportions by this factor then yields the absolute abundances of barcode.

[0646] Note that this method is only applicable for decoding an unknown sample after a set of properly normalized fingerprints has been determined.

### Scaling Fingerprints:

[0647] An important subtlety is that readouts have to be scaled even in the case of relative quantification. Specifically, the fingerprints of a set of barcodes must be properly scaled with respect to one another. Intuitively, this is because raw, unscaled fingerprints cannot be directly compared between barcodes; the read count of a binder has a different meaning in the context of a different barcode's fingerprint, because each barcode has a different conversion factor between bound binder count and read count. To ensure that fingerprints are measured in the same units, each unscaled fingerprint must each be scaled by (the inverse of) its conversion factor.

[0648] To illustrate this, consider a case with two barcodes. Suppose that, due to differences in binding affinity across the binder pool, the total amount of binder bound to 100 ng of barcode A is 10 times greater than that bound to 100 ng of barcode B. However, due to the nature of the method, the raw readouts end up having the same number of reads. In this example, one NGS read in barcode A's raw fingerprint corresponds to 10 reads in barcode B's raw fingerprint. The conversion factors are different. Now consider a sample containing a 1:1 mixture of the two barcodes. Due to the difference in affinity, the bound binder fraction in this sample is 10:1; consequently, the number of NGS reads corresponding to A and B would also be in a 10:1 ratio. In other words, the readout is proportional to 10a+b, where a is the raw readout of A and b is the raw readout of B. On the basis of this, one would come to the incorrect conclusion that A and B are in a 10:1 ratio. To correct for this, the raw fingerprint of barcode A must be multiplied by a factor of 10, compared to B, to obtain a correctly scaled fingerprint, a′=10a and b′=b. Now, when the two barcodes are mixed in equal proportions, the correct result is determined: the readout is an equally weighted mixture of the two correctly scaled fingerprints, a′+b′.

[0649] This example shows that the relative scaling factor between barcodes' raw fingerprints can be determined by measuring the readout of a known mixture of the barcodes. If the barcodes are mixed in equal proportions, the composition of the mixture readout will be each raw fingerprint, weighted by their scaling relative to each other. (Note that this gives only the relative conversion factor between the barcodes and not an absolute conversion factor to absolute barcode quantities.)

### The Decoding Algorithm:

[0650] There are two phases of the decoding algorithm:
[0651] “Training phase”: Learn the fingerprint matrix A, by measuring the readout of a number of known samples
[0652] “Testing phase”: Predict the barcode amounts in an unknown sample by measuring the readout and comparing it to A,

### Training Phase: Learning the Fingerprint Matrix

[0653] In the training phase, the fingerprints of a set of barcodes are determined by measuring the readouts of a set of samples with known composition. The fingerprints must be correctly scaled with respect to one another. One method of measuring the fingerprint matrix is outlined below.

[0654] First, a set of samples, each containing purely a single barcode are prepared. Each sample is decoded. The fingerprint of each barcode is estimated by taking multiple replicates of a barcode and averaging together their readouts. The error is reduced if more replicates are averaged. This yields an unscaled fingerprint for each barcode.

[0655] Next, the fingerprints are correctly scaled with respect to each other. This is done by multiplying each of the unscaled fingerprints by a scaling factor. To determine the scaling factor of each barcode, a sample consisting of all barcodes mixed in equal proportion is decoded. Theoretically, this readout of this sample should be the sum of the normalized fingerprints of all the barcodes, weighted equally. However, if we fit this mixture readout to the set of unnormalized fingerprints determined from the previous step, the weights of the barcodes would not be equal. The coefficients to the linear fit are precisely the factor by which each barcode's fingerprint should be multiplied by to obtain a correctly normalized fingerprint. By averaging together multiple replicates of this, a more precise estimate of the scaling factors can be determined.

[0656] This method is detailed further below. Let Ã be the unscaled fingerprint matrix obtained from averaging multiple unscaled measurements of single barcodes. Each column should sum to a fixed number of reads, so the units of Ã are counts per million. The correctly scaled fingerprint matrix A is obtained by multiplying each column of Ã by a rescaling factor S, such that A=ÃS, where S is a n×n diagonal “rescaling matrix”. Here Sᵢᵢ is the scaling factor for the i'th barcode, with units of pfu eluted per count per million. Let y be the readout of a mixture of known composition x. One way to determine scaling factors is to use the unscaled fingerprint matrix to infer a set of “biased” predictions as \tilde{x}=Ã+y=SA⁺y, where Ã⁺ is the pseudoinverse of Ã (see the prediction section below). The ratio of the “biased” prediction to the actual amount is an estimate of the scaling factor: Sᵢᵢ≈ [symbol] /xᵢ. Multiplying each unscaled fingerprint by this scaling factor gives our best estimate of the properly scaled fingerprint A=ÃS.

[0657] Note that there are other methods for measuring the fingerprint matrix. This present method only uses the single-barcode samples to determine (unnormalized) fingerprints, and the mixture samples to determine the scaling factors. More sophisticated methods may use uneven mixtures to determine scaling factors and/or use the information in these samples to better estimate the fingerprint (beyond just learning its scaling factor).

### Testing Phase: Predicting Barcode Amounts in Unknown Samples

[0658] In the testing phase we are supplied with the readout y of an unknown sample x and we aim to infer its composition, \hat{x}. This is done by fitting the readout to a linear combination of fingerprints, y=A\hat{x}, where A is the (properly scaled) fingerprint matrix learned from the training phase.

[0659] The fitting is done by choosing a set of coefficients xⱼ, which minimizes a loss function. The loss function measures the deviation between the expected and measured readout. The expected readout is the matrix product Aₓ, based on the determined fingerprints and proposed mixture coefficients. In the simplest case, the loss function is a sum of squared errors,

$$( \hat{x} ) = {\sum }_{j = 1}^{m} {( {\sum }_{i = 1}^{n} {A}_{ji} {\hat{x}}_{i} - {y}_{j} )}^{2} = {‖ A \hat{x} - y ‖}_{2}^{2}$$

and the inferred mixture composition is the minimizer of this loss, \hat{x}=argmin L(x). If the number of binders is greater than the number of barcodes, then Aₓ=y is an overdetermined system and there is a unique minimizer of the loss. The solution is given by

$$\hat{x} = {A}^{+} y$$

where A⁺=(A^{T}A)⁻¹A^{T} is the Moore-Penrose inverse of the fingerprint matrix. If relative abundances (proportions) are desired, the coefficients can be normalized to sum to 1.

[0660] Note that the L2 loss function above is the simplest case. It is (proportional to) the negative log likelihood in the case where ε₁ is absent (no noise in binding) and ε₂ is Gaussian noise of fixed variance. To model more realistic forms of noise, other loss functions can be chosen.

### APPENDIX A: BIOPHYSICAL MODEL OF BINDING PROCESS

[0661] Let n be the number of barcoded cargo polypeptide species in a sample, and let xᵢ, i=1, . . . , n be the concentrations of each barcode species added to the decoding well. Likewise, let m be the number of decoder species in the decoder pool, and let dⱼ, j=1, . . . , m be the concentrations of each decoder species added to the decoding well. Suppose that any decoder can interact with any barcode in a one-to-one stoichiometry to form a bound complex. A total number of nm such complexes can be formed, one for each barcode-decoder pair. Let cᵢⱼ, i=1, . . . , n, j=1, . . . , m be the concentration of a complex between barcode i and decoder j, and let Kᵢⱼ be the equilibrium dissociation constant characterizing the affinity of this interaction, with ΔG_{binding}=−RT ln Kᵢⱼ.

[0662] For any decoder species, we assume that the amount which binds to the sample and subsequently eluted is given by

$${y}_{j} ≡ {\sum }_{i = 1}^{m} {c}_{ij} ,$$

the bound complexes of that decoder summed over all possible barcode pairs.

[0663] In the simplest case, we assume that each species is an ideal solute in a dilute solution, and that the binding between barcodes and decoders is allowed to approach thermodynamic equilibrium. At equilibrium, some fraction of the decoders will bind to the barcodes, but there will still be remaining unbound barcodes, with concentrations \hat{x}ᵢ, i=1, . . . n, as well as unbound decoders, with concentrations \tilde{d}ⱼ, j=1, . . . m.

[0664] The equilibrium state is given by minimizing the overall free energy of the system. This is shown to be equivalent to solving the following set of equations:

$${x}_{i} = {\tilde{x}}_{i} + {\sum }_{j = 1}^{m} {c}_{ij} for i = 1 , … n$$

$${d}_{j} = {\tilde{d}}_{j} + {\sum }_{i = 1}^{n} {c}_{ij} for j = 1 , … m$$

$${K}_{ij} = {\tilde{x}}_{i} {\tilde{d}}_{j} / {c}_{ij} for i = 1 , … , n , j = 1 , … , m$$

[0665] The first equation ensures the conservation of mass: the total amount of a barcode species is the unbound amount plus the amounts bound in complexes with all possible decoder partners. The second equation is an analogous statement for the decoders. The last equation is the definition of an equilibrium constant of a barcode-decoder pair.

[0666] The known values are the equilibrium constants Kᵢⱼ and the xᵢ and dⱼ, representing the total concentration of each species of barcode and decoder, respectively, added to the well. The unknown variables are [symbol] , [symbol] , and cᵢⱼ. The values of the unknown variables are determined by solving the system of equations above.

[0667] In the decoding process, a decoder pool with fixed values of Kᵢⱼ and dⱼ is added to a sample of unknown barcode composition, xᵢ. The observable output of the binding process is the amount of each decoder species which binds to the sample,

$${y}_{j} ≡ {\sum }_{i = 1}^{m} {c}_{ij} .$$

A key question of the binding process is how the input, the barcode concentrations xᵢ, affects the output, the bound decoder amounts yⱼ.

[0668] In general, the system of equations above is non-linear, but when certain conditions are met, the binding process can be well approximated by a set of linear equations. The decoding process is greatly simplified if the underlying equations are linear. A linear system implies that, at the least:
[0669] 1) If the concentration of a barcode is doubled, the decoders bound to that barcode are all correspondingly doubled. (no saturation)
[0670] 2) If two barcodes are mixed together, the decoders bound to the mixture are the sum of the decoders bound to each barcode alone. (no competition)
   These two criteria can be thought of as linearity of single and multiple barcode detection, respectively. They are necessary, but not sufficient conditions.

[0671] To see how these criteria play in practice, consider the following binding situations which violate one or more of the criteria. Suppose that the decoder is the limiting reagent in a one-to-one stoichiometry of barcodes and decoders. Above a certain barcode concentration, all the available decoders would become saturated; an increase in xᵢ would not lead to a proportional increase in yⱼ. Thus, to avoid saturation, the barcode concentrations should be kept below the Kd of the interaction (or the decoder concentration, whichever is greater—see below).

[0672] As another example, consider a situation where two barcodes A and B both have affinity for a certain decoder D, but barcode A has a much stronger affinity than barcode B. In the absence of A, the binding of barcode B has a certain binding curve. However, if there is enough A to deplete much of the available D, the binding of barcode B to the remaining D will be significantly altered. This is a situation where A and B compete for available decoder D. Note, however, that if the binding of A did not deplete the amount of D remaining in the pool, then the binding between B and D would not be altered by the presence of A. The competitive behavior occurs only in situations where the available D is significantly consumed by binding to A—if A is highly abundant and/or the A-D affinity is strong. In both examples of non-linear situations, one or more decoders in the pool is significantly depleted by binding to barcodes.

[0673] These examples indicate that the binding process is linear when a small fraction of the decoding pool is bound to the sample. Indeed, if this condition is met, the equations above can be simplified into a simple linear system. Under this assumption, the amount of unbound decoder \tilde{d}ᵢ is well approximated by the total amount of decoder, dⱼ. If we further assume that the bound complexes deplete a small fraction of the available barcodes, then the system of equations simplifies to

$${c}_{ij} = {x}_{i} {d}_{j} / {K}_{ij}$$

and the output can be represented with a simple matrix multiplication,

$${y}_{j} = {\sum }_{i = 1}^{n} {A}_{ji} {x}_{i} with {A}_{ji} ≡ {d}_{j} / {K}_{ij}$$

### Example 9: Assessment of Absolute Cargo Abundance of a Single Test Barcode Using a Reference Barcode (or Spike-In Barcode)

[0674] The present example demonstrates a method to determine absolute cargo abundance of cargos in a pool using a reference barcode and barcode decoding.

[0675] FIG. 10A shows a schematic of an experiment. A single test barcode attached to cargo was assayed at several concentrations, ranging from 0 ng/mL to 1250 ng/mL. In the same sample, a “spike-in” barcode attached to a cargo (i.e., a reference barcode) was added to each assay mixture at 250 ng/mL. Various concentrations of a test barcoded cargo were contacted with binding agents (i.e., binding agents with binders expressed on them) and decoding was performed as described herein. Prediction of a reference or “spike-in” barcode was used to determine an absolute amount of a test barcode, and by extension a barcoded cargo, being measured (see Example 8). FIG. 10B shows a plot of measured absolute quantities of the test barcode (right bar) compared to known input concentrations of the test barcode (left bar) for each titration of the test barcode. The Y-axis is a logarithm of the test barcode concentration in nanograms per milliliter (ng/mL). FIG. 10C shows results of determination of absolute concentration for 6 different barcoded cargos. The plots show known input concentrations (left bar) and measured concentration (right bar) for six (6) different barcoded cargos.

### Example 10: Simultaneous In Vivo Assessment of Phenotypes of Cargos Using Binder-Barcode Platform

[0676] The present example demonstrates a method to perform simultaneous in vivo assessment of phenotypes of cargos using a binder-barcode platform described herein. In some embodiments, a phenotype includes pharmacokinetic (or clearance) data as described herein.

[0677] FIG. 13A is a schematic of a method to detect and/or quantify and/or characterize fourteen (14) exemplary cargos (e.g., proteins) in a pool using a binder-barcode platform described herein. Fourteen (14) exemplary binder molecules were produced with different barcodes as described herein (“binder-barcode particles”). Binder-barcode particles were injected as a pool into wild-type (wt) BALB/c mice. At timepoints 30 min, 6 hours, 24 hours, and 48 hours, blood was collected from individual mice (n=3 per timepoint), and serum was extracted. Binder-barcode particles were captured and subjected to the decoding procedure as described.

[0678] FIG. 13B shows simultaneous in vivo assessment of clearance phenotypes of cargos using a binder-barcode platform described herein. In particular, FIG. 13B shows plots of clearance of multiple cargos, measured simultaneously and grouped by rate of clearance phenotype (e.g., slow vs. fast clearance). FIG. 13B (left) depicts controls with known properties that were measured. FIG. 13B (center) depicts cargos identified as having slow clearance properties over time. FIG. 13B (right) depicts cargos identified as having fast clearance properties over time. Data was normalized to 100% of injection volume for each binder-barcode particle.

[0679] Accordingly, the present example confirms that a binder-barcode platform described herein can be used for simultaneous characterization of phenotypes in vivo.

### Example 11: Simultaneous In Vivo Assessment of Phenotypes of Cargos in Multiple Tissues Using Binder-Barcode Platform

[0680] Among other things, the present disclosure provides an insight that on-target, off-tumor toxicity is a biodistribution challenge. The present example demonstrates a method for simultaneous in vivo assessment of phenotypes of cargos in multiple tissues using a binder-barcode platform described herein. In some embodiments, a phenotype includes biodistribution data as described herein. In some embodiments, a phenotype includes pharmacokinetic (clearance) data as described herein. In some embodiments, a phenotype includes pharmacokinetic data and biodistribution data as described herein.

[0681] FIG. 14A is a schematic of a method to detect and/or identify and/or quantify and/or characterize thirty-six (36) exemplary cargos (e.g., proteins) in a pool using a binder-barcode platform described herein. Thirty-six (36) binder molecules were produced with different barcodes (“binder-barcode particles”). Binder-barcode particles were injected as a pool into tumor bearing NSG mice, which had been previously implanted with two tumor cell lines (Tumor 1, Tumor 2). At timepoints 30 min, 6 hours, 24 hours, and 48 hours, blood and tumor tissue was collected from individual mice (n=2-4 per timepoint). In some embodiments, other tissue can be harvested, including lung, liver, brain, etc. Tissue was lysed using standard lysis buffer. Serum was separated from blood. Binder-barcode particles were captured binder from each tissue and subjected to a decoding procedure as described herein.

[0682] FIG. 14B is a heat-map of all binder-barcode particle data collected as described herein. Rows indicate different binder constructs identifiers (IDs) that correlate to binder-barcode particles tested by the present example. Columns indicate data for a mouse across each time point for serum, Tumor 1, or Tumor 2. Color intensity indicates relative units of drug as measured via a decoding procedure described herein. Color intensity indicates a normalized readout of relative concentration as measured via next generation sequencing (NGS).

[0683] FIG. 14C depicts plots of binder-barcode particles described by FIG. 14B using a decoding procedure described herein. A diversity of properties was simultaneously measured. For example, binder-barcode particle P14_A5 was rapidly cleared from serum, with minimal accumulation in Tumor 1 or Tumor 2, while binder-barcode particle P17_A10 was more slowly cleared and maintained in tumor 1 over time.

[0684] Accordingly, the present example confirms that a binder-barcode platform described herein can be used for simultaneous characterization of phenotypes of cargos across multiple tissue types in vivo.

### Example 12: Simultaneous In Vivo Assessment of Phenotypes of Cargos Using Binder-Barcode Platform

[0685] The present example demonstrates a method for simultaneous in vivo assessment of phenotypes of cargos (e.g., proteins) using a binder-barcode platform described herein. In some embodiments, a phenotype is a half-life measurement as described herein.

[0686] FIG. 15A depicts a plot showing ELISA quantitation of two groups of cargos (Group 1: cargo polypeptide with no barcode; Group 2: a pool of eight (8) binder-barcode particles where each particle includes the same cargo polypeptide used in Group 1, and each particle is barcoded with a different barcode). Group 1 was injected into a cohort of wild-type (wt) BALB/c mice. Group 2 was also injected into a cohort of wild-type (wt) BALB/c mice. At timepoints 6 hours, 24 hours, and 48 hours, blood was collected from individual mice (n=3 per timepoint), and serum was extracted. ELISA quantitation showed similar measurements between Group 1 and Group 2, confirming that barcode does not affect cargo function. FIG. 15B shows a plot depicting simultaneous and individual assessment of eight (8) distinct entities in Group 2 using a decoding procedure described herein. FIG. 15C shows a comparison of half-life measurements for Group 1 and Group 2. Half-life measurements for Group 1 was quantified using ELISA (dashed line). Half-life measurements for Group 2 was quantified using a decoding procedure described herein (bars). As shown in FIG. 15C, variation in half-life measurements across different binder-barcode particles within a pool can be resolved using a binder-barcode platform described herein. Moreover, ELISA cannot perform simultaneous measurements of phenotypes in one experiment.

[0687] Accordingly, the present example confirms that a binder-barcode platform described herein can be used for simultaneous, accurate characterization of phenotypes in vivo. Moreover, the present example confirms that attachment of a barcode to a cargo using a method described herein does not disrupt in vivo properties of a cargo.

### Example 13: Sensitivity and Dynamic Range of Binder-Barcode Platform

[0688] The present example demonstrates a method to determine sensitivity and dynamic range of a binder-barcode platform described herein.

[0689] An array of ninety-six (96) mixtures comprising ten (10) to thirty-five (35) barcoded cargos (e.g., proteins), with each barcoded cargo having a known concentration between 1 picogram (pg) and 1 microgram (μg), was designed to determine sensitivity and dynamic range of a binder-barcode platform described herein (FIGS. 16A-16B). Each data point in FIG. 16B represents a comparison between a known concentration of a barcoded cargo particle from one of the ninety-six (96) distinct mixtures and a concentration determined by a decoding procedure described herein. As shown in FIG. 16B, cargos were quantified across a 10,000-fold range of concentrations. FIG. 16B also shows cargos down to 0.1 nanograms (ng) were also quantified.

[0690] Accordingly, the present example confirms that a binder-barcode platform described herein can be used for simultaneous, sensitive characterization of barcoded cargos across a broad dynamic range of concentrations in diverse mixtures.

### Example 14: Comparison of In Vitro and In Vivo Assessment of Phenotypes of Cargos Using Binder-Barcode Platform

[0691] The present example provides an insight that in vitro models sometimes fail to accurately model in vivo environments. Among other things, the present disclosure provides an insight that certain in vitro systems can be limited (e.g., with respect to their modeling of in vivo performance) by one or more of the following: two-dimensional monolayer of in vitro models versus complex three-dimensional architecture of in vivo environments, differences in target post translation modification or accessibility, differences in gene expression, absence of stromal cells and/or extracellular matrix, lack of circulation and diffusion from vasculature, or off-target and antigen sink effects not modeled in in vitro models.

[0692] Binder-barcode particles tested in Example 11 were also tested in an in vitro T cell activation assay (data not shown). A binder-barcode particle that exhibited highest T cell activation in vitro exhibited poor tumor tissue accumulation and rapid clearance in vivo. Moreover, a binder-barcode particle that exhibited modest T cell activation in vitro exhibited high tumor accumulation and slow clearance in vivo. Accordingly, the present example confirms that a binder-barcode platform described herein can be used to identify binders with unexpected in vivo properties. Moreover, the present example confirms that a binder-barcode platform described herein can be used to select therapeutic candidates exhibiting desirable phenotypes in vivo.

### Example 15: Barcode does not Significantly Affect Cargo Properties

[0693] The present example confirms that a barcode has relatively little or no effect on cargo (e.g., protein) properties. In some embodiments, a property includes cargo affinity as described herein. In some embodiments, a property includes cargo production (or yield) as described herein.

[0694] Affinity and production (or yield) of a cargo (e.g., protein) with and without a barcode were assessed using biolayer interferometry (BLI). Ten different barcodes were tested. Affinity of a barcoded cargo exhibited similar affinity of a cargo without a barcode, as measured by BLI (data not shown). Moreover, cargo production (or yield) of a barcoded cargo exhibited similar cargo production (or yield) of a cargo without a barcode, as measured by BLI (data not shown).

[0695] Accordingly, the present example confirms that cargo performance is not significantly impacted by a barcode. Moreover, the present example confirms that cargo production is not significantly impacted by a barcode.

### Example 16: Assessment and Quantification of Expression and/or Localization of Barcoded Cargo Polypeptides Delivered Using Multiple Serotypes of AAV Delivery Particles

[0696] The present example demonstrates a multiplexed, high-throughput method of measuring a barcoded cargo polypeptide as described herein. Moreover, the present example demonstrates that a binder-barcode platform described herein can be used to quantify effects (e.g., phenotypes such as localization, expression, etc.) that result from modifying cargo polypeptides as described herein. Further, the present example demonstrates that a binder-barcode platform described herein can be used to quantify effects (e.g., phenotypes such as localization, expression, etc.) that result from a type of delivery particle that is used to deliver a cargo component as described herein. In particular, the present example demonstrates effects of a secretion tag on expression and/or localization of cargo polypeptides using three different serotypes of AAV delivery particles (AAV2, AAV9, AAV.PHPB) in a pooled mixture. The present example demonstrates that expression and/or tropism of cargo polypeptides can be quantified using a binder-barcode platform as described herein.

[0697] Other types of cargo components and modifications to a cargo polypeptide can be assessed using a binder-barcode platform as described herein. Phenotypes other than expression and localization can also be quantified and/or assessed using a binder-barcode platform as described herein.

### Method

[0698] FIG. 18 depicts a schematic of an exemplary method described herein that provides for tracking and/or identification and/or assessment and/or quantification of different nucleic acids encoding a cargo component disposed within different types of delivery particles (e.g., AAV delivery particles, e.g., AAV2, AAV9, AAV.PHPB) that exhibit different tissue tropisms.

[0699] Two constructs comprising barcoded cargo components were synthesized. A first construct was formatted as Sec-ALFA-GOI-BC (“Construct 1”), where Sec is a nucleotide sequence encoding a secretory signal peptide, ALFA is a nucleotide sequence encoding a universal capture tag, GOI is a cargo component whose nucleotide sequence is or comprises a sequence encoding a cargo polypeptide of interest, and BC is a barcode component whose nucleotide sequence is or comprises a sequence encoding a peptide barcode. A second construct was formatted as ALFA-GOI-BC (“Construct 2”). A difference between Construct 1 and Construct 2 was that Construct 2 lacked a secretion signal peptide (Sec). For Construct, six (6) different versions were synthesized, and for Construct 2 nine (9) different version were synthesized, each associated with a different barcode (see Table 8). Each version of Construct 1 and Construct 2 were cloned into a backbone containing human cytomegalovirus (HCMV) promoter and an inverse terminal repeat (ITR) sequence for packaging in an adeno associate virus (AAV). The resulting plasmids were then used to produce AAV using methods known in the art. Three different AAV serotypes were used to package constructs, as shown in Table 8, namely AAV2, AAV9, and AAV-PHPB. Each version of Construct 1 and Construct 2 were individually packaged into each serotype of AAV. It is noted that AAV2 was only measured with a secretion tag. Table 8 shows experimental designs for Construct 1 and Construct 2.

TABLE 8
Different AAV variants produced and their content

| Construct # | Secretion tag | Barcode ID | AAV Serotype |
|---|---|---|---|
| 1 | Yes | 1 | AAV-2 |
| 1 | Yes | 2 | AAV-2 |
| 1 | Yes | 3 | AAV-2 |
| 1 | Yes | 4 | AAV-9 |
| 1 | Yes | 5 | AAV-9 |
| 1 | Yes | 6 | AAV-9 |
| 1 | Yes | 7 | AAV-PHPB |
| 1 | Yes | 8 | AAV-PHPB |
| 1 | Yes | 9 | AAV-PHPB |
| 2 | No | 10 | AAV-9 |
| 2 | No | 11 | AAV-9 |
| 2 | No | 12 | AAV-9 |
| 2 | No | 13 | AAV-PHPB |
| 2 | No | 14 | AAV-PHPB |
| 2 | No | 15 | AAV-PHPB |

[0700] AAV delivery particles were titered via qPCR to determine genome copies per mL (GC/mL). AAV delivery particles were pooled such that GC/mL was equal across all variants.

[0701] C57 female mice (n=15) were injected via tail vein with 1×10¹¹ total genome copies of the pooled AAV delivery particles. Three (3) mice were then euthanized at each time point (1 day, 2 days, 7 days, 14 days, and 21 days) and brain, liver and serum tissues were collected. Tissues were lysed using Radioimmunoprecipitation Assay (RIPA) buffer with a HALT protease inhibitor cocktail and two (2) rounds of bead beating for 60 seconds at 25 Hz, and barcodes were subject to decoding as previously described herein.

### Results

[0702] A person of ordinary skill in the art would understand tropisms conferred by AAV serotypes, such as AAV2, AAV9, AAV-PHPB. For example, AAV2 generally has poor expression and primarily infects liver, AAV9 has mostly high liver expression and low levels of expression in the brain, and AAV.PHPB infects and expresses cargo polypeptides in neuron cells (see Weinmann et al, Nature Communications, 11, 5432 (2020)). However, these results are either usually performed as single measurements when looking at protein, or via RNA and/or DNA sequencing of the viral genomes when looking in a pool. Furthermore, effects of incorporating one or more components such as a secretion tag on expression and/or localization of a cargo polypeptide and assessing such effects is unknown. Moreover, other technologies would not be able to assess effects on delivered cargo polypeptides using different types of delivery particles in a multiplexed and high-throughput format.

[0703] FIGS. 19A, 19B, and 19C show data for three replicate mice at 14 days, averaged across barcode and mouse replicates. It is noted that data from other time points look similar. The Y-axis in each of the graphs of FIGS. 19A-19C show a fold-change in decoding measurement for a given barcoded cargo component and serotype pair as compared to a background measurement. The X-axis in each of FIGS. 19A-19C shows various tissues analyzed for each of the three AAV serotypes. Green bars correspond to Construct 2 (i.e., constructs without a secretion tag), and orange bars correspond to Construct 1 (i.e., constructs with a secretion tag. AAV2, which was only measured with a secretion tag, had general poor expression across tissues collected compared to other serotypes (see FIG. 19A). Strikingly, when AAV9 was used for packaging, a cargo polypeptide was expressed and localized over 100-fold more in serum compared to liver when a secretion tag was associated with a cargo polypeptide (see FIG. 19B). Additionally, as shown in FIG. 19B, cargo polypeptides were not localized in serum without a secretion tag. Further, AAV9 cargo polypeptides were expressed in brain tissue, which was detected marginally over background for both Construct 1 and Construct 2. AAV.PHPB is known to infect and express exclusively from neurons. However, when a secretion tag was associated with a cargo polypeptide and packaged in AAV.PHPB, almost equal amounts of cargo polypeptide localized in serum and brain tissue (see FIGS. 19A-19C). This finding indicates that a secretion tag is leading to leakage from brain tissue. Conversely, when no secretion tag is added to a cargo polypeptide, no cargo polypeptide was seen in serum and very high levels of cargo polypeptide expression was seen in brain tissue (see FIG. 19C).

### Discussion

[0704] As described herein, peptide barcodes were used to assess effects of localization and/or expression of cargo polypeptides delivered by a variety of AAV serotypes in a single mixture. This workflow would have been previously impossible to perform and would not previously be explicitly capable of measuring delivered cargo polypeptides directly. If a skilled person were to look only at DNA and RNA of AAV, a skilled person would obtain results that are not well correlated with actual localization or expression of a cargo polypeptide. Accordingly, the present example demonstrates quantification of expression and/or localization of different types of cargo polypeptides using different types delivery particles in a single experiment using a binder-barcode platform described herein.

[0705] It is an insight of the present disclosure that other forms of delivery vehicles (e.g., viral particles, lipid-based particles ((e.g., cell-produced or not cell-produced), lipid nanoparticles (LNPs), liposomes, micelles, extracellular vesicles (e.g., exosomes, microparticles, etc.)), polymer-based particles (e.g., PGLA-based), polysaccharide-based particles, etc.) and/or nucleic acids (e.g., RNA) may be used in accordance with the Examples described herein.

[0706] Moreover, delivery particles and/or nucleic acids (e.g., RNA) may be designed and/or tested via a binder-barcode platform to assess and/or quantify nucleic acids using a binder-barcode platform described herein to address challenges with correlating an amount of nucleic acid in a tissue with functional performance (e.g., expression). Furthermore, the present example may be used to assess large pools of therapeutic polypeptides delivered simultaneously to cells, tissues, or organs. This workflow reduces a number of burdens of conventional methods, including production, assessment, and ability to capture functional readouts of cargo polypeptides and/or delivery particles in a high-throughput and multiplexed format.

### Example 17: In Vivo Discovery and Assessment of Barcoded Cargo Polypeptides that Cross the Blood-Brain Barrier (BBB) Using AAV Delivery Particles

[0707] The present example demonstrates a multiplexed, high-throughput method of measuring a barcoded cargo polypeptide as described herein. Moreover, the present example demonstrates that a binder-barcode platform described herein can be used to identify and/or quantify cargo polypeptides for certain phenotypes such as expression and/or localization. For example, in some embodiments, cargo polypeptides can be identified and/or assessed for ability to cross the blood-brain barrier (BBB) as described by this example.

### Method

[0708] A set of cargo polypeptides were measured via octet biolayer interferometry (BLI) to determine their respective dissociation against the transferrin receptor (TfR). Dissociation against TfR for another set of cargo polypeptides were determined via ELISA according to standard methods (see, e.g., Engvall, E., Clinical Chemistry, Volume 56, Issue 2, 2010, Pages 319-320). Results of an ELISA assay are shown in FIG. 22. Each cargo component encoding a cargo polypeptide was then associated with a unique barcode component Each peptide barcode encoded by a barcode component is associated (e.g., covalently or not covalently) with the C-terminus of the cargo polypeptide via a linker. Nucleic acids (or constructs) were synthesized with cargo components including a sequence encoding a cargo polypeptide, promoter elements, terminator elements, and/or ITR elements for AAV packaging according to standard methods. Table 9 below shows experimental designs for constructs tested in this example.

TABLE 9
Different AAV delivery particles produced and their content

| | | Barcode | |
|---|---|---|---|
| Construct # | Cargo | ID | AAV Serotype |
| 1 | bMB-TfR-116 | bc-28 | AAV-DJ |
| 2 | bMB-TfR-541 | bc-211 | AAV-DJ |
| 3 | bMB-TfR-305 | bc-100 | AAV-DJ |
| 4 | bMB-TfR-359 | bc-170 | AAV-DJ |
| 5 | bMB-TfR-085 | bc-248 | AAV-DJ |
| 6 | bMB-TfR-002 | bc-266 | AAV-DJ |
| 7 | bMB-TfR-353 | bc-189 | AAV-DJ |
| 8 | bMB-TfR-231 | bc-280 | AAV-DJ |
| 9 | bMB-TfR-267 | bc-238 | AAV-DJ |
| 10 | bMB-TfR-143 | bc-8 | AAV-DJ |
| 11 | bMB-TfR-300 | bc-62 | AAV-DJ |
| 12 | bMB-TfR-299 | bc-84 | AAV-DJ |
| 13 | bMB-TfR-248 | bc-20 | AAV-DJ |
| 14 | bMB-TfR-106 | bc-318 | AAV-DJ |
| 15 | bMB-TfR-352 | bc-161 | AAV-DJ |
| 16 | bMB-TfR-139 | bc-155 | AAV-DJ |
| 17 | bMB-TfR-152 | bc-27 | AAV-DJ |
| 18 | bMB-TfR-154 | bc-141 | AAV-DJ |
| 19 | bMB-TfR-158 | bc-135 | AAV-DJ |
| 20 | bMB-TfR-160 | bc-283 | AAV-DJ |
| 21 | bMB-TfR-326 | bc-43 | AAV-DJ |
| 22 | bMB-TfR-354 | bc-79 | AAV-DJ |
| 23 | bMB-TfR-144 | bc-224 | AAV-DJ |
| 24 | bMB-TfR-121 | bc-187 | AAV-DJ |
| 25 | bMB-TfR-160 | bc-33 | AAV-DJ |
| 26 | bMB-TfR-117 | bc-340 | AAV-DJ |
| 27 | bMB-TfR-136 | bc-276 | AAV-DJ |
| 28 | bMB-TfR-318 | bc-180 | AAV-DJ |
| 29 | bMB-TfR-122 | bc-86 | AAV-DJ |
| 30 | bMB-TfR-236 | bc-228 | AAV-DJ |
| 31 | bMB-TfR-140 | bc-45 | AAV-DJ |
| 32 | bMB-TfR-343 | bc-130 | AAV-DJ |
| 33 | bMB-TfR-329 | bc-4 | AAV-DJ |
| 34 | bMB-TfR-193 | bc-22 | AAV-DJ |
| 35 | bMB-TfR-559 | bc-10 | AAV-DJ |
| 36 | bMB-TfR-086 | bc-167 | AAV-DJ |
| 37 | bMB-TfR-265 | bc-251 | AAV-DJ |
| 38 | bMB-TfR-324 | bc-304 | AAV-DJ |
| 39 | bMB-TfR-313 | bc-292 | AAV-DJ |
| 40 | bMB-TfR-356 | bc-73 | AAV-DJ |
| 41 | bMB-TfR-357 | bc-168 | AAV-DJ |
| 42 | bMB-TfR-379 | bc-162 | AAV-DJ |
| 43 | bMB-TfR-345 | bc-32 | AAV-DJ |
| 44 | bMB-TfR-016 | bc-7 | AAV-DJ |
| 45 | bMB-TfR-847 | bc-278 | AAV-DJ |
| 46 | bMB-TfR-994 | bc-150 | AAV-DJ |
| 47 | bMB-TfR-525 | bc-17 | AAV-DJ |
| 48 | bMB-TfR-387 | bc-195 | AAV-DJ |
| 49 | bMB-TfR-365 | bc-249 | AAV-DJ |
| 50 | bMB-TfR-334 | bc-142 | AAV-DJ |
| 51 | bMB-TfR-151 | bc-226 | AAV-DJ |
| 52 | bMB-TfR-136 | bc-122 | AAV-DJ |
| 53 | bMB-TfR-310 | bc-196 | AAV-DJ |
| 54 | bMB-TfR-295 | bc-93 | AAV-DJ |
| 55 | bMB-TfR-302 | bc-59 | AAV-DJ |
| 56 | bMB-TfR-312 | bc-25 | AAV-DJ |
| 57 | bMB-TfR-321 | bc-145 | AAV-DJ |
| 58 | bMB-TfR-142 | bc-40 | AAV-DJ |
| 59 | bMB-TfR-989 | bc-41 | AAV-DJ |
| 60 | fc5_vhh | bc-270 | AAV-DJ |
| 61 | lag16 | bc-53 | AAV-DJ |
| 62 | fc5_vhh | bc-116 | AAV-DJ |
| 63 | lag16 | bc-52 | AAV-DJ |
| 64 | fc5_vhh | bc-327 | AAV-DJ |
| 65 | lag16 | bc-97 | AAV-DJ |
| 66 | bMB-TfR-113 | bc-28 | AAV-DJ |
| 67 | bMB-TfR-896 | bc-211 | AAV-DJ |
| 68 | bMB-TfR-962 | bc-100 | AAV-DJ |
| 69 | bMB-TfR-309 | bc-170 | AAV-DJ |
| 70 | bMB-TfR-876 | bc-248 | AAV-DJ |
| 71 | bMB-TfR-064 | bc-266 | AAV-DJ |
| 72 | bMB-TfR-215 | bc-189 | AAV-DJ |
| 73 | bMB-TfR-141 | bc-280 | AAV-DJ |
| 74 | bMB-TfR-147 | bc-238 | AAV-DJ |
| 75 | bMB-TfR-979 | bc-8 | AAV-DJ |
| 76 | bMB-TfR-341 | bc-62 | AAV-DJ |
| 77 | bMB-TfR-383 | bc-84 | AAV-DJ |
| 78 | bMB-TfR-278 | bc-20 | AAV-DJ |
| 79 | bMB-TfR-445 | bc-318 | AAV-DJ |
| 80 | bMB-TfR-264 | bc-161 | AAV-DJ |
| 81 | bMB-TfR-109 | bc-155 | AAV-DJ |
| 82 | bMB-TfR-157 | bc-27 | AAV-DJ |
| 83 | bMB-TfR-151 | bc-141 | AAV-DJ |
| 84 | bMB-TfR-933 | bc-135 | AAV-DJ |
| 85 | bMB-TfR-157 | bc-283 | AAV-DJ |
| 86 | bMB-TfR-125 | bc-43 | AAV-DJ |
| 87 | bMB-TfR-306 | bc-79 | AAV-DJ |
| 88 | bMB-TfR-192 | bc-224 | AAV-DJ |
| 89 | bMB-TfR-320 | bc-187 | AAV-DJ |
| 90 | bMB-TfR-126 | bc-33 | AAV-DJ |
| 91 | bMB-TfR-360 | bc-340 | AAV-DJ |
| 92 | bMB-TfR-953 | bc-276 | AAV-DJ |
| 93 | bMB-TfR-363 | bc-180 | AAV-DJ |
| 94 | bMB-TfR-250 | bc-86 | AAV-DJ |
| 95 | bMB-TfR-898 | bc-228 | AAV-DJ |
| 96 | bMB-TfR-888 | bc-45 | AAV-DJ |
| 97 | bMB-TfR-328 | bc-130 | AAV-DJ |
| 98 | bMB-TfR-348 | bc-4 | AAV-DJ |
| 99 | bMB-TfR-119 | bc-22 | AAV-DJ |
| 100 | bMB-TfR-296 | bc-10 | AAV-DJ |
| 101 | bMB-TfR-293 | bc-167 | AAV-DJ |
| 102 | bMB-TfR-350 | bc-251 | AAV-DJ |
| 103 | bMB-TfR-335 | bc-304 | AAV-DJ |
| 104 | bMB-TfR-155 | bc-292 | AAV-DJ |
| 105 | bMB-TfR-315 | bc-73 | AAV-DJ |
| 106 | bMB-TfR-373 | bc-168 | AAV-DJ |
| 107 | bMB-TfR-301 | bc-162 | AAV-DJ |
| 108 | bMB-TfR-872 | bc-32 | AAV-DJ |
| 109 | bMB-TfR-280 | bc-7 | AAV-DJ |
| 110 | bMB-TfR-140 | bc-278 | AAV-DJ |
| 111 | bMB-TfR-149 | bc-150 | AAV-DJ |
| 112 | bMB-TfR-126 | bc-17 | AAV-DJ |
| 113 | bMB-TfR-162 | bc-195 | AAV-DJ |
| 114 | bMB-TfR-143 | bc-249 | AAV-DJ |
| 115 | bMB-TfR-337 | bc-142 | AAV-DJ |
| 116 | bMB-TfR-123 | bc-226 | AAV-DJ |
| 117 | bMB-TfR-112 | bc-122 | AAV-DJ |
| 118 | bMB-TfR-393 | bc-196 | AAV-DJ |
| 119 | bMB-TfR-377 | bc-93 | AAV-DJ |
| 120 | bMB-TfR-107 | bc-59 | AAV-DJ |
| 121 | bMB-TfR-252 | bc-25 | AAV-DJ |
| 122 | bMB-TfR-319 | bc-145 | AAV-DJ |
| 123 | bMB-TfR-137 | bc-40 | AAV-DJ |
| 124 | bMB-TfR-098 | bc-41 | AAV-DJ |

[0709] DNA of the aforementioned nucleic acid constructs were pooled in equimolar ratios to form two non-overlapping pools. These pools were then used to construct AAV delivery particles according to standard methods. Two pools were then titered using a qPCR assay to determine the genome copies present per ml (GC/mL). Titers for the two pools are shown in a table below.

TABLE 10
Table showing GC/mL for two pools AAV

| Pool # | AAV Library | GC/mL |
|---|---|---|
| 1 | AAV-library-1 | 7.48 × 10¹² GC/mL |
| 2 | AAV-library-2 | 1.82 × 10¹³ GC/mL |

[0710] AAV delivery particles were diluted to 5×10¹¹ GC/mL and 200 μL of each of the two AAV libraries was injected into transgenic female C57 containing a humanized transferrin receptor allele (Mouse strain C57BU/6-Tfr1tm1TFR1/Bcgen). Each AAV library was injected into 15 individual mice (n=15). Three (3) mice are euthanized at each time point (7 days, 14 days, 21 days, and 28 days). Mice are perfused with 2× blood volumes of Phosphate buffered Saline (PBS). Blood is then collected and serum is separated from blood. After perfusion, brain, liver, muscle, skin, heart, lung, kidney, stomach, intestine tissues are all collected. Tissue is then lysed and subjected to decoding as described herein.

### Results

[0711] The present example demonstrates that a binder-barcode platform as described herein can quantify localization and/or expression of cargo polypeptide in certain tissues, including brain tissue, and can determine if said cargo polypeptide is also localizing and/or being expressed in other tissue (such as serum), including a ratio of amount of cargo polypeptide being expressed across different tissue types. For example, data in FIG. 21 shows respective dissociation of cargo polypeptides against the transferrin receptor (TfR) according to embodiments described herein.

[0712] Moreover, delivery particles, including AAV delivery particles, provide continuous expression of cargo polypeptides, which increases overall sensitivity of a binder-barcode platform as described herein. Ability to quantify potent and functional delivery of cargo polypeptides across different tissues can help identify potent cargo polypeptides that not only cross the BBB but are retained and/or more significantly expressed in brain tissue compared to other tissues.

[0713] It is an insight of the present disclosure that other forms of delivery vehicles (e.g., viral particles, lipid-based particles ((e.g., cell-produced or not cell-produced), lipid nanoparticles (LNPs), liposomes, micelles, extracellular vesicles (e.g., exosomes, microparticles, etc.)), polymer-based particles (e.g., PGLA-based), polysaccharide-based particles, etc.) and/or nucleic acids (e.g., RNA) may be used in accordance with the Examples described herein.

[0714] Accordingly, the present example demonstrates a multiplexed and high-throughput approach that can be used to identify and quantify cargo polypeptides that cross the BBB.

### Example 18: In Vivo Discovery and Assessment of Barcoded Cargo Polypeptides that Target Tumors Using AAV Delivery Particles

[0715] The present example demonstrates a multiplexed method of measuring pooled barcoded cargo polypeptides to assess tumor targeting using AAV delivery particles and a binder-barcode platform as described herein.

### Method

[0716] A set of cargo polypeptides is measured via octet biolayer interferometry (BLI) to determine their respective dissociation against a tumor target. Another set of cargo polypeptides is determined via ELISA according to standard methods (see, e.g., Engvall, E., Clinical Chemistry, Volume 56, Issue 2, 2010, Pages 319-320). Each cargo component encoding a cargo polypeptide was then associated with a unique barcode component. Each peptide barcode encoded by a barcode component is associated (e.g., covalently or not covalently) with the C-terminus of the cargo polypeptide via a linker. Nucleic acids (or constructs) were synthesized with cargo components including a sequence encoding a cargo polypeptide, promoter elements, terminator elements, and/or ITR elements for AAV packaging according to standard methods. Table 11 below shows experimental designs for constructs tested in this example.

TABLE 11
Different AAV delivery particles produced and their content

| Construct | | | AAV |
|---|---|---|---|
| # | Cargo | Barcode ID | Serotype |
| 1 | bMB-N4-3 | 1 | AAV-8 |
| 2 | bMB-N4-4 | 2 | AAV-8 |
| 3 | bMB-N4-8 | 3 | AAV-8 |
| 4 | bMB-N4-11 | 4 | AAV-8 |
| 5 | bMB-N4-13 | 5 | AAV-8 |
| 6 | bMB-N4-34 | 6 | AAV-8 |
| 7 | bMB-N4-40 | 7 | AAV-8 |
| 8 | bMB-N4-52 | 8 | AAV-8 |
| 9 | bMB-N4-53 | 9 | AAV-8 |
| 10 | bMB-N4-59 | 10 | AAV-8 |
| 11 | bMB-N4-69 | 11 | AAV-8 |
| 12 | bMB-N4-79 | 12 | AAV-8 |
| 13 | bMB-N4-82 | 13 | AAV-8 |
| 14 | bMB-N4-86 | 14 | AAV-8 |
| 15 | bMB-N4-87 | 15 | AAV-8 |
| 16 | bMB-N4-94 | 16 | AAV-8 |
| 17 | bMB-N4-98 | 17 | AAV-8 |
| 18 | bMB-N4-99 | 18 | AAV-8 |
| 19 | bMB-N4-102 | 19 | AAV-8 |
| 20 | bMB-N4-103 | 20 | AAV-8 |
| 21 | bMB-N4-108 | 21 | AAV-8 |
| 22 | bMB-N4-111 | 22 | AAV-8 |
| 23 | bMB-N4-113 | 23 | AAV-8 |
| 24 | bMB-N4-115 | 24 | AAV-8 |
| 25 | bMB-N4-119 | 25 | AAV-8 |
| 26 | bMB-N4-122 | 26 | AAV-8 |
| 27 | bMB-N4-126 | 27 | AAV-8 |
| 28 | bMB-N4-127 | 28 | AAV-8 |
| 29 | bMB-N4-131 | 29 | AAV-8 |
| 30 | bMB-N4-135 | 30 | AAV-8 |
| 31 | bMB-N4-138 | 31 | AAV-8 |
| 32 | bMB-N4-143 | 32 | AAV-8 |
| 33 | bMB-N4-146 | 33 | AAV-8 |
| 34 | bMB-N4-147 | 34 | AAV-8 |
| 35 | bMB-N4-148 | 35 | AAV-8 |
| 36 | bMB-N4-154 | 36 | AAV-8 |
| 37 | bMB-N4-155 | 37 | AAV-8 |
| 38 | bMB-N4-160 | 38 | AAV-8 |
| 39 | bMB-N4-162 | 39 | AAV-8 |
| 40 | bMB-N4-166 | 40 | AAV-8 |
| 41 | bMB-N4-170 | 41 | AAV-8 |
| 42 | bMB-N4-179 | 42 | AAV-8 |
| 43 | bMB-N4-183 | 43 | AAV-8 |
| 44 | bMB-N4-185 | 44 | AAV-8 |
| 45 | bMB-N4-190 | 45 | AAV-8 |
| 46 | bMB-N4-193 | 46 | AAV-8 |
| 47 | bMB-N4-194 | 47 | AAV-8 |
| 48 | bMB-N4-198 | 48 | AAV-8 |
| 49 | bMB-N4-199 | 49 | AAV-8 |
| 50 | bMB-N4-208 | 50 | AAV-8 |
| 51 | bMB-N4-209 | 51 | AAV-8 |
| 52 | bMB-N4-215 | 52 | AAV-8 |
| 53 | bMB-N4-216 | 53 | AAV-8 |
| 54 | bMB-N4-219 | 54 | AAV-8 |
| 55 | bMB-N4-220 | 55 | AAV-8 |
| 56 | bMB-N4-221 | 56 | AAV-8 |
| 57 | bMB-N4-222 | 57 | AAV-8 |
| 58 | bMB-N4-223 | 58 | AAV-8 |
| 59 | bMB-N4-234 | 59 | AAV-8 |
| 60 | bMB-N4-236 | 60 | AAV-8 |
| 61 | bMB-N4-240 | 61 | AAV-8 |
| 62 | bMB-N4-248 | 62 | AAV-8 |
| 63 | bMB-N4-251 | 63 | AAV-8 |
| 64 | bMB-N4-253 | 64 | AAV-8 |
| 65 | bMB-N4-264 | 65 | AAV-8 |
| 66 | bMB-N4-295 | 66 | AAV-8 |
| 67 | bMB-N4-297 | 67 | AAV-8 |
| 68 | bMB-N4-314 | 68 | AAV-8 |
| 69 | bMB-N4-325 | 69 | AAV-8 |
| 70 | bMB-N4-327 | 70 | AAV-8 |
| 71 | bMB-N4-349 | 71 | AAV-8 |
| 72 | bMB-N4-351 | 72 | AAV-8 |
| 73 | bMB-N4-356 | 73 | AAV-8 |
| 74 | bMB-N4-359 | 74 | AAV-8 |
| 75 | bMB-N4-364 | 75 | AAV-8 |
| 76 | bMB-N4-377 | 76 | AAV-8 |
| 77 | bMB-N4-385 | 77 | AAV-8 |
| 78 | bMB-N4-387 | 78 | AAV-8 |
| 79 | bMB-N4-388 | 79 | AAV-8 |
| 80 | bMB-N4-389 | 80 | AAV-8 |
| 81 | bMB-N4-390 | 81 | AAV-8 |
| 82 | bMB-N4-394 | 82 | AAV-8 |
| 83 | bMB-N4-398 | 83 | AAV-8 |
| 84 | bMB-N4-400 | 84 | AAV-8 |
| 85 | bMB-N4-401 | 85 | AAV-8 |
| 86 | bMB-N4-409 | 86 | AAV-8 |
| 87 | bMB-N4-446 | 87 | AAV-8 |
| 88 | bMB-N4-448 | 88 | AAV-8 |
| 89 | bMB-N4-467 | 89 | AAV-8 |
| 90 | bMB-N4-483 | 90 | AAV-8 |
| 91 | bMB-N4-559 | 91 | AAV-8 |
| 92 | bMB-N4-627 | 92 | AAV-8 |
| 93 | bMB-N4-638 | 93 | AAV-8 |
| 94 | bMB-N4-768 | 94 | AAV-8 |
| 95 | bMB-N4-772 | 95 | AAV-8 |
| 96 | bMB-N4-775 | 96 | AAV-8 |
| 97 | bMB-N4-785 | 97 | AAV-8 |
| 98 | bMB-N4-787 | 98 | AAV-8 |
| 99 | bMB-N4-788 | 99 | AAV-8 |
| 100 | bMB-N4-789 | 100 | AAV-8 |
| 101 | bMB-N4-790 | 101 | AAV-8 |
| 102 | bMB-N4-796 | 102 | AAV-8 |
| 103 | bMB-N4-797 | 103 | AAV-8 |
| 104 | bMB-N4-810 | 104 | AAV-8 |
| 105 | bMB-N4-819 | 105 | AAV-8 |
| 106 | bMB-N4-820 | 106 | AAV-8 |
| 107 | bMB-N4-822 | 107 | AAV-8 |
| 108 | bMB-N4-846 | 108 | AAV-8 |
| 109 | bMB-N4-857 | 109 | AAV-8 |
| 110 | bMB-N4-860 | 110 | AAV-8 |
| 111 | bMB-N4-861 | 111 | AAV-8 |
| 112 | bMB-N4-870 | 112 | AAV-8 |
| 113 | bMB-N4-876 | 113 | AAV-8 |
| 114 | bMB-N4-877 | 114 | AAV-8 |
| 115 | bMB-N4-879 | 115 | AAV-8 |
| 116 | bMB-N4-881 | 116 | AAV-8 |
| 117 | bMB-N4-883 | 117 | AAV-8 |
| 118 | bMB-N4-890 | 118 | AAV-8 |
| 119 | bMB-N4-922 | 119 | AAV-8 |
| 120 | bMB-N4-934 | 120 | AAV-8 |
| 121 | bMB-N4-940 | 121 | AAV-8 |
| 122 | bMB-N4-942 | 122 | AAV-8 |
| 123 | bMB-N4-955 | 123 | AAV-8 |
| 124 | bMB-N4-960 | 124 | AAV-8 |
| 125 | bMB-N4-975 | 125 | AAV-8 |
| 126 | bMB-N4-985 | 126 | AAV-8 |
| 127 | bMB-N4-988 | 127 | AAV-8 |
| 128 | bMB-N4-997 | 128 | AAV-8 |
| 129 | bMB-N4-1000 | 129 | AAV-8 |
| 130 | bMB-N4-1003 | 130 | AAV-8 |
| 131 | bMB-N4-1004 | 131 | AAV-8 |
| 132 | bMB-N4-1007 | 132 | AAV-8 |
| 133 | bMB-N4-1009 | 133 | AAV-8 |
| 134 | bMB-N4-1011 | 134 | AAV-8 |
| 135 | bMB-N4-1023 | 135 | AAV-8 |
| 136 | bMB-N4-1025 | 136 | AAV-8 |
| 137 | bMB-N4-1031 | 137 | AAV-8 |
| 138 | bMB-N4-1032 | 138 | AAV-8 |
| 139 | bMB-N4-1033 | 139 | AAV-8 |
| 140 | bMB-N4-1037 | 140 | AAV-8 |
| 141 | bMB-N4-1050 | 141 | AAV-8 |
| 142 | bMB-N4-1052 | 142 | AAV-8 |
| 143 | bMB-N4-1059 | 143 | AAV-8 |
| 144 | bMB-N4-1060 | 144 | AAV-8 |
| 145 | bMB-N4-1063 | 145 | AAV-8 |
| 146 | bMB-N4-1065 | 146 | AAV-8 |
| 147 | bMB-N4-1068 | 147 | AAV-8 |
| 148 | bMB-N4-1069 | 148 | AAV-8 |
| 149 | bMB-N4-1071 | 149 | AAV-8 |
| 150 | bMB-N4-1072 | 150 | AAV-8 |
| 151 | bMB-N4-1093 | 151 | AAV-8 |
| 152 | bMB-N4-1097 | 152 | AAV-8 |
| 153 | bMB-N4-1098 | 153 | AAV-8 |
| 154 | bMB-N4-1103 | 154 | AAV-8 |
| 155 | bMB-N4-1106 | 155 | AAV-8 |
| 156 | bMB-N4-1124 | 156 | AAV-8 |
| 157 | bMB-N4-1131 | 157 | AAV-8 |
| 158 | bMB-N4-1132 | 158 | AAV-8 |
| 159 | bMB-N4-1133 | 159 | AAV-8 |
| 160 | bMB-N4-1135 | 160 | AAV-8 |
| 161 | bMB-N4-1137 | 161 | AAV-8 |
| 162 | bMB-N4-1141 | 162 | AAV-8 |
| 163 | bMB-N4-1143 | 163 | AAV-8 |
| 164 | bMB-N4-1145 | 164 | AAV-8 |
| 165 | bMB-N4-1161 | 165 | AAV-8 |
| 166 | bMB-N4-1162 | 166 | AAV-8 |
| 167 | bMB-N4-1167 | 167 | AAV-8 |
| 168 | bMB-N4-1172 | 168 | AAV-8 |
| 169 | bMB-N4-1177 | 169 | AAV-8 |
| 170 | bMB-N4-1180 | 170 | AAV-8 |
| 171 | bMB-N4-1184 | 171 | AAV-8 |
| 172 | bMB-N4-1193 | 172 | AAV-8 |
| 173 | bMB-N4-1196 | 173 | AAV-8 |
| 174 | bMB-N4-1205 | 174 | AAV-8 |
| 175 | bMB-N4-1206 | 175 | AAV-8 |
| 176 | bMB-N4-1210 | 176 | AAV-8 |
| 177 | bMB-N4-1215 | 177 | AAV-8 |
| 178 | bMB-N4-1217 | 178 | AAV-8 |
| 179 | bMB-N4-1223 | 179 | AAV-8 |
| 180 | bMB-N4-1230 | 180 | AAV-8 |
| 181 | bMB-N4-1239 | 181 | AAV-8 |
| 182 | bMB-N4-1250 | 182 | AAV-8 |
| 183 | bMB-N4-1251 | 183 | AAV-8 |
| 184 | bMB-N4-1252 | 184 | AAV-8 |
| 185 | bMB-N4-1257 | 185 | AAV-8 |
| 186 | bMB-N4-1259 | 186 | AAV-8 |
| 187 | bMB-N4-1277 | 187 | AAV-8 |
| 188 | bMB-N4-1278 | 188 | AAV-8 |
| 189 | bMB-N4-1279 | 189 | AAV-8 |
| 190 | bMB-N4-1284 | 190 | AAV-8 |
| 191 | bMB-N4-1292 | 191 | AAV-8 |
| 192 | bMB-N4-1293 | 192 | AAV-8 |
| 193 | bMB-N4-1307 | 193 | AAV-8 |
| 194 | bMB-N4-1310 | 194 | AAV-8 |
| 195 | bMB-N4-1312 | 195 | AAV-8 |
| 196 | bMB-N4-1313 | 196 | AAV-8 |
| 197 | bMB-N4-1330 | 197 | AAV-8 |
| 198 | bMB-N4-1338 | 198 | AAV-8 |
| 199 | bMB-N4-1357 | 199 | AAV-8 |
| 200 | bMB-N4-1360 | 200 | AAV-8 |
| 201 | bMB-N4-1361 | 201 | AAV-8 |
| 202 | bMB-N4-1362 | 202 | AAV-8 |
| 203 | bMB-N4-1363 | 203 | AAV-8 |
| 204 | bMB-N4-1367 | 204 | AAV-8 |
| 205 | bMB-N4-1371 | 205 | AAV-8 |
| 206 | bMB-N4-1379 | 206 | AAV-8 |
| 207 | bMB-N4-1381 | 207 | AAV-8 |
| 208 | bMB-N4-1388 | 208 | AAV-8 |
| 209 | bMB-N4-1398 | 209 | AAV-8 |
| 210 | bMB-N4-1407 | 210 | AAV-8 |
| 211 | bMB-N4-1408 | 211 | AAV-8 |
| 212 | bMB-N4-1414 | 212 | AAV-8 |
| 213 | bMB-N4-1416 | 213 | AAV-8 |
| 214 | bMB-N4-1417 | 214 | AAV-8 |
| 215 | bMB-N4-1425 | 215 | AAV-8 |
| 216 | bMB-N4-1436 | 216 | AAV-8 |
| 217 | bMB-N4-1443 | 217 | AAV-8 |
| 218 | bMB-N4-1447 | 218 | AAV-8 |
| 219 | bMB-N4-1452 | 219 | AAV-8 |
| 220 | bMB-N4-1467 | 220 | AAV-8 |

[0717] DNA of the aforementioned nucleic acid constructs are pooled in equimolar ratios to form two non-overlapping pools. These pools are then used to construct AAV delivery particles according to standard methods. Two pools are then titered using a qPCR assay to determine the genome copies present per ml (GC/mL).

[0718] AAV delivery particles are diluted to about 5×10¹¹ GC/mL and 200 μL of each of the two AAV libraries is injected via tail vein into transgenic NSG mice. In parallel, the mice are injected subcutaneously with 5*10⁶ SW780 cells, a cell line exhibiting epithelial morphology that was isolated from the urinary bladder of a human patient with transitional cell carcinoma, in the left flank, and 5*10⁶ HCT116 cells, a cell line that was isolated from the colon of an adult human male with colon cancer, in the right flank in a 200 μL volume composed of 50% Matrigel (Corning® Matrigel® Matrix) and 50% DMEM. When tumors reach 200-250 mm³ in size, mice are euthanized. Mice are perfused with 2× blood volumes of Phosphate buffered Saline (PBS). Blood is then collected and serum is separated from blood. After perfusion, brain, liver, muscle, skin, heart, lung, kidney, stomach, intestine tissues are all collected. Tissue is then lysed and subjected to decoding as described previously herein.

### DISCUSSION

[0719] The present example demonstrates that a binder-barcode platform as described herein can quantify localization and/or expression of cargo polypeptide in certain tissues, including tumor tissue. Moreover, the present example demonstrates that a binder-barcode platform as described herein can determine if said cargo polypeptide is also localizing and/or being expressed in other tissue (such as serum), including a ratio of amount of cargo polypeptide being expressed across different tissue types.

[0720] Moreover, delivery particles, including AAV delivery particles, provide continuous expression of cargo polypeptides, which increases overall sensitivity of a binder-barcode platform as described herein. Ability to quantify targeted and functional delivery of cargo polypeptides across different tissues can help determine potent cargo polypeptides that not only specifically target tumor tissues but are retained and/or more significantly expressed in tumor tissue compared to other tissues.

[0721] It is an insight of the present disclosure that other forms of delivery vehicles (e.g., viral particles, lipid-based particles ((e.g., cell-produced or not cell-produced), lipid nanoparticles (LNPs), liposomes, micelles, extracellular vesicles (e.g., exosomes, microparticles, etc.)), polymer-based particles (e.g., PGLA-based), polysaccharide-based particles, etc.) and/or nucleic acids (e.g., RNA) may be used in accordance with the Examples described herein.

[0722] Accordingly, the present example demonstrates a multiplexed and high-throughput approach that can be used to identify and quantify cargo polypeptides that target tumor tissue.

### Example 19: In Vivo Discovery and Assessment of Barcoded Cargo Polypeptides Delivered Using Lipid Nanoparticles (LNPs)

[0723] The present example demonstrates a multiplexed method of measuring barcoded polypeptides administered in a pooled mixture using a lipid nanoparticle delivery particles (LNPs) and a binder-barcode platform as described herein.

### Method

[0724] LNPs containing a barcoded cargo component are synthesized according to methods known in the art. 1 mg of LNP for each barcoded cargo component is generated. A table describing different variations of LNPs and/or cargo components is provided below. LNP Formulation “A” refers to an exemplary formulation that may be used in accordance with embodiments of the present disclosure. In other embodiments, other types of formulations may be used.

TABLE 12
Different LNP variants produced and their content

| Construct # | Cargo | Barcode ID | LNP Formulation |
|---|---|---|---|
| LNP1 | ALFA-Sec-GOI | 1 | A |
| LNP2 | ALFA-Sec-GOI | 2 | A |
| LNP3 | ALFA-Sec-GOI | 3 | A |
| LNP4 | ALFA-GOI | 4 | A |
| LNP5 | ALFA-GOI | 5 | A |
| LNP6 | ALFA-GOI | 6 | A |

[0725] LNPs are pooled equally by mass and 200 μg of the LNP pool is injected via tail vein into female C57 mice (n=10). At a 24 hour time point, mice are euthanized and brain, liver, muscle, skin, heart, lung, kidney, stomach, intestine tissues are collected. Tissue is then lysed and subjected to decoding as described herein.

### Discussion

[0726] Accordingly, the present example demonstrates that multiple cargo polypeptides can be delivered using pooled LNPs and assessed in parallel. An amount of each barcoded component delivered to each tissue of the mouse is readily assessed using a binder-barcode platform. Moreover, a functional readout, including expression of each cargo polypeptide, is assessed and quantified using a binder-barcode platform described herein.

### Example 20: In Vivo Discovery and Assessment of Tissue-Specific Barcoded Cargo Polypeptides Using AAV Delivery Particles

[0727] The present example demonstrates a multiplexed method of measuring a barcoded polypeptide to assess tissue-specific expression of a cargo polypeptide using a binder-barcode platform as described herein. Moreover, the present example describes methods for quantifying and/or assessing a library of cargo components that encode a cargo polypeptide. As described herein, in some embodiments, each cargo component may further comprise a tissue-specific promoter. As described herein, in some embodiments, each cargo component may further comprise an untranslated region (UTR). As described herein, in some embodiments, each cargo component may further comprise a tissue-specific promoter and a UTR. In such an embodiment, the present example describes demonstrates quantification of effects of promoters on cargo polypeptide expression and/or localization. A binder-barcode platform described herein is used to quantify effects of cargo polypeptide localization and/or expression based on additional variables included in the cargo component As such, a binder-barcode platform as described herein can be used to identify cargo components based on desired phenotypes of cargo polypeptides.

[0728] Other types of cargo components and modifications to a cargo polypeptide can be assessed using a binder-barcode platform as described herein. Phenotypes other than expression and localization can also be quantified and/or assessed using a binder-barcode platform as described herein.

### Method

[0729] Different nucleic acids comprising barcoded cargo components were designed as follows. Cargo components that encode a cargo polypeptide can also include other components such as promoters, UTRs, or combinations thereof. Each cargo component encoding a cargo polypeptide was then associated with a unique barcode component. Each peptide barcode encoded by a barcode component is associated (e.g., covalently or not covalently) with the C-terminus of the cargo polypeptide via a linker. Nucleic acids (or constructs) were synthesized with cargo components including a sequence encoding a cargo polypeptide, promoter elements, terminator elements, and/or ITR elements for packaging into AAV delivery particles. A table describing different variations of AAV delivery particles and/or cargo components is provided below.

TABLE 13
Different variants produced and their content

| Construct | | Barcode | AAV | | |
|---|---|---|---|---|---|
| # | Cargo | ID | Serotype | Promoter | UTR |
| 1 | ALFA-Sec-GOI | 1 | AAV-9 | CMV | WPRE |
| 2 | ALFA-Sec-GOI | 2 | AAV-9 | CMV + intron | WPRE |
| 3 | ALFA-Sec-GOI | 3 | AAV-9 | EFIA | WPRE |
| 4 | ALFA-Sec-GOI | 4 | AAV-9 | EFS | WPRE |
| 5 | ALFA-Sec-GOI | 5 | AAV-9 | CAG | WPRE |
| 6 | ALFA-Sec-GOI | 6 | AAV-9 | CBh | WPRE |
| 7 | ALFA-Sec-GOI | 7 | AAV-9 | CBA | WPRE |
| 8 | ALFA-Sec-GOI | 8 | AAV-9 | SFFV | WPRE |
| 9 | ALFA-Sec-GOI | 9 | AAV-9 | MSCV | WPRE |
| 10 | ALFA-Sec-GOI | 10 | AAV-9 | SV40 | WPRE |
| 11 | ALFA-Sec-GOI | 11 | AAV-9 | mPGK | WPRE |
| 12 | ALFA-Sec-GOI | 12 | AAV-9 | hPGK | WPRE |
| 13 | ALFA-Sec-GOI | 13 | AAV-9 | UBC | WPRE |
| 14 | ALFA-Sec-GOI | 14 | AAV-9 | Mammalian | WPRE |
| | | | | Tissue- | |
| | | | | Specific | |
| | | | | Promoters | |
| 15 | ALFA-Sec-GOI | 15 | AAV-9 | Name | WPRE |
| 16 | ALFA-Sec-GOI | 16 | AAV-9 | Nanog | WPRE |
| 17 | ALFA-Sec-GOI | 17 | AAV-9 | Nes | WPRE |
| 18 | ALFA-Sec-GOI | 18 | AAV-9 | Tuba1a | WPRE |
| 19 | ALFA-Sec-GOI | 19 | AAV-9 | Camk2a(long) | WPRE |
| 20 | ALFA-Sec-GOI | 20 | AAV-9 | Camk2a(short) | WPRE |
| 21 | ALFA-Sec-GOI | 21 | AAV-9 | SYN1 | WPRE |
| 22 | ALFA-Sec-GOI | 22 | AAV-9 | Hb9 | WPRE |
| 23 | ALFA-Sec-GOI | 23 | AAV-9 | Th | WPRE |
| 24 | ALFA-Sec-GOI | 24 | AAV-9 | Thy1 | WPRE |
| 25 | ALFA-Sec-GOI | 25 | AAV-9 | NSE | WPRE |
| 26 | ALFA-Sec-GOI | 26 | AAV-9 | GFAP(long) | WPRE |
| 27 | ALFA-Sec-GOI | 27 | AAV-9 | GFAP(short) | WPRE |
| 28 | ALFA-Sec-GOI | 28 | AAV-9 | Iba1 | WPRE |
| 29 | ALFA-Sec-GOI | 29 | AAV-9 | ProA1 | WPRE |
| 30 | ALFA-Sec-GOI | 30 | AAV-9 | hRHO | WPRE |
| 31 | ALFA-Sec-GOI | 31 | AAV-9 | hBEST1 | WPRE |
| 32 | ALFA-Sec-GOI | 32 | AAV-9 | Grm6 | WPRE |
| 33 | ALFA-Sec-GOI | 33 | AAV-9 | Grm6(short) | WPRE |
| 34 | ALFA-Sec-GOI | 34 | AAV-9 | Grm6(long) | WPRE |
| 35 | ALFA-Sec-GOI | 35 | AAV-9 | Prnp | WPRE |
| 36 | ALFA-Sec-GOI | 36 | AAV-9 | Cnp | WPRE |
| 37 | ALFA-Sec-GOI | 37 | AAV-9 | K14 | WPRE |
| 38 | ALFA-Sec-GOI | 38 | AAV-9 | K19 | WPRE |
| 39 | ALFA-Sec-GOI | 39 | AAV-9 | BK5 | WPRE |
| 40 | ALFA-Sec-GOI | 40 | AAV-9 | mTyr | WPRE |
| 41 | ALFA-Sec-GOI | 41 | AAV-9 | cTnT | WPRE |
| 42 | ALFA-Sec-GOI | 42 | AAV-9 | αMHC(long) | WPRE |
| 43 | ALFA-Sec-GOI | 43 | AAV-9 | αMHC(short) | WPRE |
| 44 | ALFA-Sec-GOI | 44 | AAV-9 | Myog | WPRE |
| 45 | ALFA-Sec-GOI | 45 | AAV-9 | ACTA1 | WPRE |
| 46 | ALFA-Sec-GOI | 46 | AAV-9 | MHCK7 | WPRE |
| 47 | ALFA-Sec-GOI | 47 | AAV-9 | SM22a | WPRE |
| 48 | ALFA-Sec-GOI | 48 | AAV-9 | EnSM22a | WPRE |
| 49 | ALFA-Sec-GOI | 49 | AAV-9 | Runx2 | WPRE |
| 50 | ALFA-Sec-GOI | 50 | AAV-9 | OC | WPRE |
| 51 | ALFA-Sec-GOI | 51 | AAV-9 | Col1a1 | WPRE |
| 52 | ALFA-Sec-GOI | 52 | AAV-9 | Col2a1 | WPRE |
| 53 | ALFA-Sec-GOI | 53 | AAV-9 | aP2 | WPRE |
| 54 | ALFA-Sec-GOI | 54 | AAV-9 | Adipoq | WPRE |
| 55 | ALFA-Sec-GOI | 55 | AAV-9 | Tie1 | WPRE |
| 56 | ALFA-Sec-GOI | 56 | AAV-9 | Cd144 | WPRE |
| 57 | ALFA-Sec-GOI | 57 | AAV-9 | CD68(short) | WPRE |
| 58 | ALFA-Sec-GOI | 58 | AAV-9 | CD68(long) | WPRE |
| 59 | ALFA-Sec-GOI | 59 | AAV-9 | CD11b | WPRE |
| 60 | ALFA-Sec-GOI | 60 | AAV-9 | Afp | WPRE |
| 61 | ALFA-Sec-GOI | 61 | AAV-9 | Alb | WPRE |
| 62 | ALFA-Sec-GOI | 62 | AAV-9 | TBG | WPRE |
| 63 | ALFA-Sec-GOI | 63 | AAV-9 | TBG + intron | WPRE |
| 64 | ALFA-Sec-GOI | 64 | AAV-9 | MMTV | WPRE |
| 65 | ALFA-Sec-GOI | 65 | AAV-9 | Wap | WPRE |
| 66 | ALFA-Sec-GOI | 66 | AAV-9 | HIP | WPRE |
| 67 | ALFA-Sec-GOI | 67 | AAV-9 | Pdx1 | WPRE |
| 68 | ALFA-Sec-GOI | 68 | AAV-9 | Ins2 | WPRE |
| 69 | ALFA-Sec-GOI | 69 | AAV-9 | Hcn4 | WPRE |
| 70 | ALFA-Sec-GOI | 70 | AAV-9 | NPHS2 | WPRE |
| 71 | ALFA-Sec-GOI | 71 | AAV-9 | SPB | WPRE |
| 72 | ALFA-Sec-GOI | 72 | AAV-9 | CD144 | WPRE |
| 73 | ALFA-Sec-GOI | 73 | AAV-9 | TERT | WPRE |
| 74 | ALFA-Sec-GOI | 74 | AAV-9 | CMV | oPRE |
| 75 | ALFA-Sec-GOI | 75 | AAV-9 | CMV + intron | oPRE |
| 76 | ALFA-Sec-GOI | 76 | AAV-9 | EF1A | oPRE |
| 77 | ALFA-Sec-GOI | 77 | AAV-9 | EFS | oPRE |
| 78 | ALFA-Sec-GOI | 78 | AAV-9 | CAG | oPRE |
| 79 | ALFA-Sec-GOI | 79 | AAV-9 | CBh | oPRE |
| 80 | ALFA-Sec-GOI | 80 | AAV-9 | CBA | oPRE |
| 81 | ALFA-Sec-GOI | 81 | AAV-9 | SFFV | oPRE |
| 82 | ALFA-Sec-GOI | 82 | AAV-9 | MSCV | oPRE |
| 83 | ALFA-Sec-GOI | 83 | AAV-9 | SV40 | oPRE |
| 84 | ALFA-Sec-GOI | 84 | AAV-9 | mPGK | oPRE |
| 85 | ALFA-Sec-GOI | 85 | AAV-9 | hPGK | oPRE |
| 86 | ALFA-Sec-GOI | 86 | AAV-9 | UBC | oPRE |
| 87 | ALFA-Sec-GOI | 87 | AAV-9 | Mammalian | oPRE |
| | | | | Tissue- | |
| | | | | Specific | |
| | | | | Promoters | |
| 88 | ALFA-Sec-GOI | 88 | AAV-9 | Name | oPRE |
| 89 | ALFA-Sec-GOI | 89 | AAV-9 | Nanog | oPRE |
| 90 | ALFA-Sec-GOI | 90 | AAV-9 | Nes | oPRE |
| 91 | ALFA-Sec-GOI | 91 | AAV-9 | Tuba1a | oPRE |
| 92 | ALFA-Sec-GOI | 92 | AAV-9 | Camk2a(long) | oPRE |
| 93 | ALFA-Sec-GOI | 93 | AAV-9 | Camk2a(short) | oPRE |
| 94 | ALFA-Sec-GOI | 94 | AAV-9 | SYN1 | oPRE |
| 95 | ALFA-Sec-GOI | 95 | AAV-9 | Hb9 | oPRE |
| 96 | ALFA-Sec-GOI | 96 | AAV-9 | Th | oPRE |
| 97 | ALFA-Sec-GOI | 97 | AAV-9 | Thy1 | oPRE |
| 98 | ALFA-Sec-GOI | 98 | AAV-9 | NSE | oPRE |
| 99 | ALFA-Sec-GOI | 99 | AAV-9 | GFAP(long) | oPRE |
| 100 | ALFA-Sec-GOI | 100 | AAV-9 | GFAP(short) | oPRE |
| 101 | ALFA-Sec-GOI | 101 | AAV-9 | Iba1 | oPRE |
| 102 | ALFA-Sec-GOI | 102 | AAV-9 | ProA1 | oPRE |
| 103 | ALFA-Sec-GOI | 103 | AAV-9 | hRHO | oPRE |
| 104 | ALFA-Sec-GOI | 104 | AAV-9 | hBEST1 | oPRE |
| 105 | ALFA-Sec-GOI | 105 | AAV-9 | Grm6 | oPRE |
| 106 | ALFA-Sec-GOI | 106 | AAV-9 | Grm6(short) | oPRE |
| 107 | ALFA-Sec-GOI | 107 | AAV-9 | Grm6(long) | oPRE |
| 108 | ALFA-Sec-GOI | 108 | AAV-9 | Prnp | oPRE |
| 109 | ALFA-Sec-GOI | 109 | AAV-9 | Cnp | oPRE |
| 110 | ALFA-Sec-GOI | 110 | AAV-9 | K14 | oPRE |
| 111 | ALFA-Sec-GOI | 111 | AAV-9 | K19 | oPRE |
| 112 | ALFA-Sec-GOI | 112 | AAV-9 | BK5 | oPRE |
| 113 | ALFA-Sec-GOI | 113 | AAV-9 | mTyr | oPRE |
| 114 | ALFA-Sec-GOI | 114 | AAV-9 | cTnT | oPRE |
| 115 | ALFA-Sec-GOI | 115 | AAV-9 | αMHC(long) | oPRE |
| 116 | ALFA-Sec-GOI | 116 | AAV-9 | αMHC(short) | oPRE |
| 117 | ALFA-Sec-GOI | 117 | AAV-9 | Myog | oPRE |
| 118 | ALFA-Sec-GOI | 118 | AAV-9 | ACTA1 | oPRE |
| 119 | ALFA-Sec-GOI | 119 | AAV-9 | MHCK7 | oPRE |
| 120 | ALFA-Sec-GOI | 120 | AAV-9 | SM22a | oPRE |
| 121 | ALFA-Sec-GOI | 121 | AAV-9 | EnSM22a | oPRE |
| 122 | ALFA-Sec-GOI | 122 | AAV-9 | Runx2 | oPRE |
| 123 | ALFA-Sec-GOI | 123 | AAV-9 | OC | oPRE |
| 124 | ALFA-Sec-GOI | 124 | AAV-9 | Col1a1 | oPRE |
| 125 | ALFA-Sec-GOI | 125 | AAV-9 | Col2a1 | oPRE |
| 126 | ALFA-Sec-GOI | 126 | AAV-9 | aP2 | oPRE |
| 127 | ALFA-Sec-GOI | 127 | AAV-9 | Adipoq | oPRE |
| 128 | ALFA-Sec-GOI | 128 | AAV-9 | Tie1 | oPRE |
| 129 | ALFA-Sec-GOI | 129 | AAV-9 | Cd144 | oPRE |
| 130 | ALFA-Sec-GOI | 130 | AAV-9 | CD68(short) | oPRE |
| 131 | ALFA-Sec-GOI | 131 | AAV-9 | CD68(long) | oPRE |
| 132 | ALFA-Sec-GOI | 132 | AAV-9 | CD11b | oPRE |
| 133 | ALFA-Sec-GOI | 133 | AAV-9 | Afp | oPRE |
| 134 | ALFA-Sec-GOI | 134 | AAV-9 | Alb | oPRE |
| 135 | ALFA-Sec-GOI | 135 | AAV-9 | TBG | oPRE |
| 136 | ALFA-Sec-GOI | 136 | AAV-9 | TBG + intron | oPRE |
| 137 | ALFA-Sec-GOI | 137 | AAV-9 | MMTV | oPRE |
| 138 | ALFA-Sec-GOI | 138 | AAV-9 | Wap | oPRE |
| 139 | ALFA-Sec-GOI | 139 | AAV-9 | HIP | oPRE |
| 140 | ALFA-Sec-GOI | 140 | AAV-9 | Pdx1 | oPRE |
| 141 | ALFA-Sec-GOI | 141 | AAV-9 | Ins2 | oPRE |
| 142 | ALFA-Sec-GOI | 142 | AAV-9 | Hcn4 | oPRE |
| 143 | ALFA-Sec-GOI | 143 | AAV-9 | NPHS2 | oPRE |
| 144 | ALFA-Sec-GOI | 144 | AAV-9 | SPB | oPRE |
| 145 | ALFA-Sec-GOI | 145 | AAV-9 | CD144 | oPRE |
| 146 | ALFA-Sec-GOI | 146 | AAV-9 | TERT | oPRE |

[0730] DNA of the aforementioned nucleic acid constructs is pooled in equimolar ratios. This is then used to construct AAV delivery particles according to standard methods. Pools are then titered using a qPCR assay to determine the genome copies present per ml (GC/mL).

[0731] AAV delivery particles are diluted to about 5×10¹¹ GC/mL and 200 μL of the AAV libraries is injected into transgenic mice.

[0732] Mice are euthanized at 7 days, 14 days, 21 days, and 28 days. At these endpoints, blood is collected and serum is separated from blood. Afterwards, mice are perfused with 2× blood volumes of Phosphate buffered Saline (PBS) and brain, liver, muscle, skin, heart, lung, kidney, stomach and intestine tissues are all collected. Tissue is then lysed and subjected to decoding as described herein.

[0733] In some embodiments, nucleic acids (constructs) are also delivered to mice via other types of delivery particles, including LNPs (see, e.g., Example 4). Mice are euthanized at 7, 14, 21 and/or 28 days. Blood is collected and serum is separated from blood. Then, mice are perfused with PBS and brain, liver, muscle, skin, heart, lung, kidney, stomach and intestine tissues are all collected. Tissue is then lysed and subjected to decoding as described herein.

### Discussion

[0734] Accordingly, the present example demonstrates the ability to measure localization and/or expression of multiple cargo polypeptides delivered through different delivery particles (e.g., AAV, lipid-based, etc.) in parallel. Accordingly, multiple cargo component designs can be assessed in parallel across multiple tissues of interest as described herein.

### Example 21: In Vivo Inducible Expression of Barcoded Cargo Polypeptides Delivered Using AAV Delivery Particles

[0735] The present example demonstrates a multiplexed method of measuring a barcoded cargo polypeptide to assess inducible expression of the cargo polypeptide delivered using delivery particles as described herein.

[0736] Other types of cargo components and modifications to a cargo polypeptide can be assessed using a binder-barcode platform as described herein. Phenotypes other than expression and localization can also be quantified and/or assessed using a binder-barcode platform as described herein.

### Method

[0737] Different nucleic acids comprising barcoded cargo components were designed as follows. Cargo components that encode a cargo polypeptide, can include other components such as inducible promoters. In some embodiments, inducible promoters require an exogenous signal (e.g., Doxycycline (DOX)) to be activated and drive expression of a cargo polypeptide. Each cargo component encoding a cargo polypeptide was then associated with a unique barcode component. Each peptide barcode encoded by a barcode component is associated (e.g., covalently or not covalently) with the C-terminus of the cargo polypeptide via a linker. Nucleic acids (or constructs) were synthesized with cargo components including a sequence encoding a cargo polypeptide, promoter elements, terminator elements, and/or ITR elements for packing into AAV delivery particles. A table describing different variations of AAV delivery particles and/or cargo components is provided below.

TABLE 14
Different variants produced and their content

| | | | | | Exogenous |
|---|---|---|---|---|---|
| Construct | AAV | | | | Signal |
| # | Serotype | Cargo | Barcode ID | Promotor | Required |
| 1 | AAV-9 | ALFA-Sec-GOI | 1 | Tert | Tetracycline |
| 2 | AAV-9 | ALFA-Sec-GOI | 2 | Dox | Doxycycline |

[0738] DNA of the aforementioned nucleic acid constructs is pooled in equimolar ratios. This is then used to construct AAV delivery particles according to standard methods. Pools are then titered using a qPCR assay to determine the genome copies present per ml (GC/mL).

[0739] AAV delivery particles are diluted to about 5×10¹¹ GC/mL and 200 μL of the AAV libraries is injected into transgenic mice. Mice are euthanized at 7 days, 14 days, 21 days, and 28 days. At these endpoints, blood is collected and serum is separated from blood. Afterwards, mice are perfused with 2× blood volumes of Phosphate buffered Saline (PBS) and brain, liver, muscle, skin, heart, lung, kidney, stomach and intestine tissues are all collected. Tissue is then lysed and subjected to decoding as described herein.

[0740] In some embodiments, nucleic acids (constructs) are also delivered to mice via other types of delivery particles, including LNPs (see, e.g., Example 4). Mice are euthanized at 7, 14, 21 and/or 28 days. Blood is collected and serum is separated from blood. Then, mice are perfused with PBS and brain, liver, muscle, skin, heart, lung, kidney, stomach and intestine tissues are all collected. Tissue is then lysed and subjected to decoding as described herein.

### Discussion

[0741] Accordingly, the present example demonstrates the ability to measure localization and/or expression of multiple cargo polypeptides delivered through different delivery particles (e.g., AAV, lipid-based, etc.) in parallel. Accordingly, multiple cargo component designs can be assessed in parallel across multiple tissues of interest as described herein.

### Example 22: In Vivo Discovery and Assessment of Tissue-Specific Barcoded Cargo Polypeptides Using Lentivirus Delivery Particles

[0742] Example 20 is repeated using lentivirus delivery particles.

### Example 23: In Vivo Multiplexed Screening of TfR Shuttles that Cross the Blood-Brain Barrier (BBB)

[0743] The present example demonstrates a multiplexed, high-throughput method of screening shuttles (e.g., shuttle moieties) as described herein. The present example also demonstrates that a binder-barcode platform described herein can be used to assess inducible expression of a delivered cargo polypeptide. Moreover, the present example demonstrates that a binder-barcode platform described herein can be used to identify and/or quantify cargo polypeptides and/or components thereof for certain phenotypes such as expression and/or localization. For example, in some embodiments, shuttles (e.g., shuttle moieties) can be identified and/or assessed for ability to cross the blood-brain barrier (BBB) (e.g., by binding to a BBB surface receptor and inducing transcytosis into the brain) as described by this example. In some embodiments, a shuttle is or comprises a shuttle moiety.

[0744] Other types of cargo components can be assessed using a binder-barcode platform as described herein. Phenotypes other than expression and localization can also be quantified and/or assessed using a binder-barcode platform as described herein. Exemplary phenotypes include epitope properties, affinity, thermostability, pH sensitivity, or other phenotypes described herein.

### Method

[0745] Transferrin receptor (TfR) was selected as an initial brain target to be targeted by a shuttle moiety as described herein.

[0746] Following phage-display discovery, 239 unique anti-TfR VHHs with unique properties including: epitope, affinity, thermostability, and pH sensitivity, were nominated for screening in vivo (see FIG. 24A). Protein language models (not shown in FIG. 24A) and phage-based readouts were used to inform this selection.

[0747] The 239 VHHs were simultaneously screened in vivo in sets of 15 to 96, at doses ranging from 0.5 to 1 mg/kg, depending on batch size (see FIG. 24B). Brain, serum, cell-free fraction (parenchyma), and muscle tissue abundances were quantified using barcodes at 24 hours (1 day). Hits demonstrating favorable brain uptake and stable PK (robust serum levels) were advanced for further screening and validation.

### Example 24: Multiplexed In Vivo Assessment of Phenotypes of Shuttles Using Binder-Barcode Platform

[0748] The present example demonstrates a method to perform multiplexed in vivo assessment of phenotypes of shuttles (e.g., brain shuttle moieties) using a binder-barcode platform described herein. In some embodiments, a phenotype includes pharmacokinetic (or clearance) data as described herein.

### Method

[0749] Select candidates from a TfR screen performed in Example 23 were analyzed in a multiplexed PK analysis. Results of this experiment are shown in FIG. 25. As shown in FIG. 25, “shuttle” candidates showed a diversity of different PK properties across blood, brain, and peripheral tissues.

### Example 25: In Vivo Multiplexed Screening of TfR Shuttles that Cross the Blood-Brain Barrier (BBB)

[0750] The present example demonstrates a multiplexed, high-throughput method of screening shuttles (e.g., shuttle agents or shuttle moieties) as described herein. The present example also demonstrates that a binder-barcode platform described herein can be used to assess inducible expression of a delivered cargo polypeptide. Moreover, the present example demonstrates that a binder-barcode platform described herein can be used to identify and/or quantify cargo polypeptides and/or shuttle-cargo polypeptides and/or shuttles and/or components thereof for certain phenotypes such as expression and/or localization. For example, in some embodiments, shuttles (e.g., shuttle moieties) can be identified and/or assessed for ability to cross the blood-brain barrier (BBB) (e.g., by binding to a BBB surface receptor and inducing transcytosis into the brain) as described by this example. In some embodiments, a shuttle is or comprises a shuttle moiety.

[0751] Other types of cargo components can be assessed using a binder-barcode platform as described herein. Phenotypes other than expression and localization can also be quantified and/or assessed using a binder-barcode platform as described herein. Exemplary phenotypes include epitope properties, affinity, thermostability, pH sensitivity, or other phenotypes described herein.

### Method

[0752] Transferrin receptor (TfR) was selected as an initial brain target to be targeted by a shuttle moiety as described herein. See, e.g., FIGS. 26-27.

### Molecule Construction and Production:

[0753] Following phage-display discovery, 250 unique anti-TfR VHHs with unique binding properties including: epitope, affinity, thermostability, and pH sensitivity, were nominated for screening in vivo. These anti-TfR VHHs were produced as C-terminal Fc fusions.

[0754] Plasmid backbone, VHH, or barcode gene fragment was PCR amplified using 10 ng of template DNA. Template DNA, primers (500 nM final concentration), and water were combined with Q5 High-Fidelity Master Mix (1× final concentration, NEB) and amplified for 30 cycles. Plasmid backbone PCR product was purified with Nucleospin PCR Cleanup Kit (Machery Nagel). 10 μg purified, linear plasmid backbone was digested for 2 hours at 37° C. with FastDigest DpnI (Invitrogen) before heat inactivation and SPRI purification (Bulldog Bio). 25 ng backbone DNA were combined 1:3 with insert DNA and HiFi Assembly Master Mix (1× final concentration, NEB). Assembly reaction was incubated for 1 hour at 50° C. 2.5 ng assembled plasmid product was used as the template for PCR amplification. 500 ng PCR amplified DNA was complexed with Expifectamine293 according to manufacturer recommendations (Gibco) in a transfection volume of 800 μL in 12 replicates. Transfected cells were harvested by centrifugation on day 5. 800 μL of cell culture supernatant was transferred to a fresh 96-deep well plate containing 12.5 μL MagSepharose PrismA beads (Cytiva). Supernatants and beads were incubated at 36.5° C. for 1 hour at 1,000 RPM. Beads were collected, washed, and purified antibodies eluted into 120 μL 100 mM glycine, 150 mM sodium chloride, pH 2.0 using the KingFisher Purification System (Thermo Fisher) and neutralized with 15 μL 1 M Sodium Phosphate, pH 7. Purified antibodies were quantified by BCA before pooling at the appropriate mass to achieve 1, 2.5, or 5 mg/kg dosing (IgG equivalent) and concentrated using centrifugal concentrators (10 kDa MWCO, MilliporeSigma) to a final volume of 1050 μL. Final concentration of the pooled antibodies was measured by BCA. Antibody pools were snap frozen in liquid nitrogen before dosing.

### Animals:

[0755] All procedures in animals were performed in adherence to ethical regulations and protocols approved by Avastus Institutional Animal Care and Use Committee (IACUC). Mice were housed under a 12-hour light/dark cycle and had access to water and standard rodent diet (LabDiet #25502, Irradiated) ad libitum.

[0756] hTfR mice (C57BL/6-Tfr1tm1TFR1/Bcgen, B-hTFR1, 110861) were obtained from Biocytogen. Mice were randomly assigned to groups based on predetermined sample sizes. Experimenters were not blinded to the sample groups.

### In Vivo Screen:

[0757] Antibodies were pooled into test articles in groups of 50-100 and were injected at 1 mg/kg/antibody. A total of 3 mice per TA group were systemically dosed via tail vein. After 24 hours, animals were sacrificed and blood was collected in serum separator tubes via cardiac puncture. Prior to organ collection, mice were transcardially perfused with PBS. The brain was divided into two hemispheres and along with muscle, liver, heart and lungs, all tissues were snap frozen and stored at −80° C.

### Tissue Processing:

[0758] One hemisphere of brain tissues (right side) was lysed (750 μL) using RIPA buffer (ThermoFisher) with Halt protease inhibitor (ThermoFisher, 1:100) in a TissueLyzer (Qiagen) on at 30 rpm for 7 min using a stainless-steel bead of 5 mm (Qiagen). Upon ensuring that the sample is lysed, tubes are centrifuged at 7000 g at 4° C. for 20 min. The supernatant was collected representing the whole brain fraction and was subjected to quantification using decoding protocol described herein.

[0759] For parenchymal extraction, the other brain hemisphere (left) was minced into small pieces with a scalpel in an HBSS buffer containing 10 mM HEPES. The sample was homogenized using a long 21 G cannula (0.8 mm×120 mm) mounted on a 2 mL syringe by aspirating and pushing out 20 times. Homogenate was transferred to 2 mL tubes and centrifuged at 2000 g at 4° C. for 10 min. Supernatant here represents the whole parenchyma while the pellet, when lysed, represents the myelin and vessels fraction. Whole parenchyma was further processed into cell free and cell-associated fractions. For other tissues (muscle, heart, liver and lung), an above-mentioned lysis protocol was followed. All supernatants post-lysis were collected and subjected for quantification through decoding protocol described herein.

### Quantification:

[0760] Molecules were quantified using decoding protocol described herein. Briefly, lysed tissue samples were incubated with magnetic beads coated with ALFAtag single-domain antibody (ALFA Selector ST, Nanotag Biotechnologies, Germany) added at 10 μL per well and incubated shaking at 900 rpm to ensure thorough mixing of beads for 1.5 hours at room temperature (RT), plates were then moved to 4° C. to continue capturing overnight. Beads were washed once with 1×PBS and the appropriate scFv decoder phage library (1E10 pfu/mL) was added to bind the barcodes for 2 hours at RT, shaking at 900 rpm. Beads were then washed three times to remove non-specifically binding phages in 1×PBST (0.1% Tween-20) using an extractor shield to carefully transfer the beads to each wash plate. After the final wash, beads were incubated in Trypsin (0.1 μg/mL, Sigma Aldrich) for 1 hour at 37° C. to elute phages off of the beads. Eluate was then added to E. coli TG1 cells (LGC, Biosearch Technologies) in exponential phase (OD600=0.4) and incubated for 1 hour at 37° C., shaking at 1000 rpm. Carbenicillin (120 μg/mL, Sigma Aldrich) and Glucose (1%) were added to LB media (Sigma Aldrich) and 1 mL of this prepared media was added to the bacterial cells infected with phages and incubated shaking at 1000 rpm for 16 hours at 37° C. Samples were then subjected to NGS library preparation where 1 μL of cells were added to Q5 High-Fidelity 2× Master Mix (NEB) with appropriate forward and reverse primers (0.75 μM final concentration) to amplify the scFv decoder insert and libraries were amplified with 13 cycles of PCR. DNA libraries were then indexed with unique dual index primers (i5 and i7) to enable sequencing and the libraries were pooled together post-indexing. Libraries were then purified using SPRI bead purification (CleanNGS DNA purification magnetic beads) using an amount appropriate for the desired size selection and DNA was eluted in a buffer containing 10 mM Tris-HCl (pH 8.0) with 0.1 mM EDTA. DNA libraries were then sequenced with Illumina's NextSeq 2000 sequencer, generating paired end reads of 150 bp. Precise quantification of barcode amounts in the tissue samples from NGS data was enabled by including a standard curve that was decoded with known amounts of protein in commercially purchased (Transnetyx) strain-matched control tissues lysed with the above-mentioned lysis protocol under a larger scale (GentleMacs). A known amount of control phage was also added to every well for normalization of the NGS signal across all the wells thereby enabling accurate and meaningful quantification of barcode amounts in the wells.

### Results

[0761] FIG. 28 shows results of quantification across all 250 binders tested in a humanized mouse. Relative concentrations as measured via NGS quantification depict several log order variations in brain concentration, with top tested molecules being enriched 4 log orders more than the lowest concentration molecules. FIG. 29 shows a scatter plot comparing relative serum concentration of relative brain concentration for the same set of molecules. Using the combination of this data, a set of molecules was manually curated which contained high brain uptake relative to serum abundance.

[0762] FIGS. 47A-47D depicts plots showing multiplexed in vivo screening data of shuttle candidates. The diagonal lines with percentages denote brain/serum ratios. FIG. 47A depicts plots related to protein-barcoded anti-TfR1 nanobodies screened in multiplex in humanized TfR1 mice (n=3), with takedown and analysis of serum and whole-brain tissue conducted at 24 hrs post-injection. A total of 250 total molecules were screened and those nanobodies detected in brain are shown.

### Example 26: Multiplexed In Vivo Assessment of Phenotypes of Shuttles Using Binder-Barcode Platform

[0763] The present example demonstrates a method to perform multiplexed in vivo assessment of phenotypes of shuttles (e.g., brain shuttle moieties) using a binder-barcode platform described herein. In some embodiments, a phenotype includes pharmacokinetic (or clearance) data as described herein.

### Method

### Molecule Construction and Production:

[0764] Plasmid backbone, VHH, or Barcode gene fragment was PCR amplified using 10 ng of template DNA. Forward and reverse primer (500 nM final concentration) was combined with Q5 High-Fidelity Master Mix (Ix final concentration, NEB) and amplified for 30 cycles. Plasmid backbone PCR product was purified with Nucleospin PCR Cleanup Kit (Machery Nagel). 10 μg purified, linear plasmid backbone was digested for 2 hours at 37° C. with FastDigest DpnI (Invitrogen) before heat inactivation and SPRI purification (Bulldog Bio). 25 ng backbone DNA were combined 1.3 with insert DNA and HiFi Assembly Master Mix (1× final concentration, NEB). Assembly reaction was incubated for 1 hour at 50° C. 2.5 ng assembled plasmid product was used as the template for PCR amplification. 12.5 Mg PCR amplified DNA was complexed with Expifectamine293 according to manufacturer recommendations (Gibco) in a transfection volume of 25 mL. Transfected cells were harvested by centrifugation on day 5. 30 μL cell culture supernatant was diluted 1:4 in 1×PBS, 0.5% BSA, 0.05% Tween20 and quantified by Octet by interpolating the initial slope against a linear, point-to-point curve of the standard curve (200, 100, 50, 25, 12.5, 6.25, 3.125, 0 μg/mL). Harvested supernatant from each antibody transfection was combined equimolar by dosing group for pooled purification. Purification was performed on an Akta Pure25 with a HitTrap MabSelect SuRe pcc column at 5 mL/min. Pooled cell culture supernatant was loaded onto the column washed with 25 mM sodium phosphate, 150 mM sodium chloride, 10% glycerol pH 6.0 and eluted with 100 mM glycine, 500 mM sodium chloride, 10% glycerol, pH 3.2 directly into 10% volume of 1M sodium phosphate, pH 6.0. Peak fractions were pooled, concentrated using centrifugal concentrators (10 kDa MWCO, MilliporeSigma) and diluted to a final concentration of ˜0.3 mg/mL/antibody to dose at 5 mg/kg/antibody (IgG equivalent). Antibody pools were snap frozen in liquid nitrogen and thawed before dosing.

### In Vivo Screening:

[0765] Antibodies were pooled into test articles in groups of 5-10 and were injected at 5 mg/kg/antibody. A total of 3 mice per TA group per time point were systemically dosed via tail vein. After 6, 24 and 72 hours, animals were sacrificed and blood was collected in serum separator tubes via cardiac puncture. Prior to organ collection, mice were transcardially perfused with PBS. The brain was divided into two hemispheres and along with muscle, liver, heart and lungs, all tissues were snap frozen and stored at −80° C.

### Tissue Processing:

[0766] One hemisphere of brain tissues (right side) was lysed (750 μL) using RIPA buffer (ThermoFisher) with Halt protease inhibitor (ThermoFisher, 1:100) in a TissueLyzer (Qiagen) on at 30 rpm for 7 min using a stainless steel bead of 5 mm (Qiagen). Upon ensuring that the sample is lysed, tubes are centrifuged at 7000 g at 4° C. for 20 min. The supernatant was collected representing the whole brain fraction and was subjected to quantification using decoding protocol described herein.

[0767] For parenchymal extraction, the other brain hemisphere (left) was minced into small pieces with a scalpel in an HBSS buffer containing 10 mM HEPES. The sample was homogenized using a long 21 G cannula (0.8 mm×120 mm) mounted on a 2 mL syringe by aspirating and pushing out 20 times. Homogenate was transferred to 2 mL tubes and centrifuged at 2000 g at 4° C. for 10 min. Supernatant here represents the whole parenchyma while the pellet, when lysed, represents the myelin and vessels fraction. The whole parenchyma was further processed into cell free and cell-associated fractions. For other tissues (muscle, heart, liver and lung), the above-mentioned lysis protocol was followed. All supernatants post-lysis were collected and subjected for quantification through decoding protocol described herein.

### Quantification:

[0768] Molecules were quantified using decoding protocol described herein. Briefly, lysed tissue samples were incubated with magnetic beads coated with ALFAtag single-domain antibody (ALFA Selector ST, Nanotag Biotechnologies, Germany) added at 10 μL per well and incubated shaking at 900 rpm to ensure thorough mixing of beads for 1.5 hours at room temperature (RT), plates were then moved to 4° C. to continue capturing overnight. Beads were washed once with 1×PBS and the appropriate scFv decoder phage library (1E10 pfu/mL) was added to bind the barcodes for 2 hours at RT, shaking at 900 rpm. Beads were then washed three times to remove non-specifically binding phages in 1×PBST (0.1% Tween-20) using an extractor shield to carefully transfer the beads to each wash plate. After the final wash, beads were incubated in Trypsin (0.1 μg/mL, Sigma Aldrich) for 1 hour at 37° C. to elute phages off of the beads. The eluate was then added to E. coli TG1 cells (LGC, Biosearch Technologies) in exponential phase (OD600=0.4) and incubated for 1 hour at 37° C., shaking at 1000 rpm. Carbenicillin (120 μg/mL, Sigma Aldrich) and Glucose (1%) were added to LB media (Sigma Aldrich) and 1 mL of this prepared media was added to the bacterial cells infected with phages and incubated shaking at 1000 rpm for 16 hours at 37° C. Samples were then subjected to NGS library preparation where 1 μL of cells were added to Q5 High-Fidelity 2× Master Mix (NEB) with appropriate forward and reverse primers (0.75 μM final concentration) to amplify the scFv decoder insert and libraries were amplified with 13 cycles of PCR. DNA libraries were then indexed with unique dual index primers (i5 and 17) to enable sequencing and the libraries were pooled together post-indexing. Libraries were then purified using SPRI bead purification (CleanNGS DNA purification magnetic beads) using an amount appropriate for the desired size selection and DNA was eluted in a buffer containing 10 mM Tris-HCl (pH 8.0) with 0.1 mM EDTA. DNA libraries were then sequenced with Illumina's NextSeq 2000 sequencer, generating paired end reads of 150 bp. Precise quantification of barcode amounts in the tissue samples from NGS data was enabled by including a standard curve that was decoded with known amounts of protein in commercially purchased (Transnetyx) strain-matched control tissues lysed with the above-mentioned lysis protocol under a larger scale (GentleMacs). A known amount of control phage was also added to every well for normalization of the NGS signal across all the wells thereby enabling accurate and meaningful quantification of barcode amounts in the wells.

### Results

[0769] FIG. 30A-FIG. 30D show brain, serum, parenchyma and muscle pharmacokinetics for all measured molecules selected for follow up from an in vivo screen described by Example 25. Notably, a wide variety of phenotypes were observed. TfR shuttle 1409 (i.e., TfR-1409) and its variant TfR-1409-51, and TfR shuttle 891 (i.e., TfR-891) have strong brain uptake when compared to molecules without shuttles, or the VHH shuttle selected for low brain uptake, TfR-732.

[0770] FIG. 30E shows AUCs for molecules over time, highlighting variant TfR-1409-51, which has the best accumulation compared to other molecules tested.

[0771] FIG. 30F, shows data comparing serum AUC to both brain and parenchyma AUC, highlighting variation across molecules. As shown in FIG. 30f, variant TfR-1409-51 exhibited a highest ratio of brain concentration comparatively to serum data.

[0772] Accordingly, the present example identifies variant shuttle moieties that exhibit improved properties relative to other shuttle moieties in a multiplexed format.

### Example 27: Design of Improved Variants of TfR and FLT1 Shuttles Using Protein Language Model (PLM) Diversification

[0773] The present example demonstrates design of improved variants of shuttles (e.g., brain shuttle moieties). In some embodiments, an improved variant of a shuttle exhibits improved phenotypes of shuttles. In some embodiments, a phenotype includes pharmacokinetic (or clearance) data as described herein.

### Method

[0774] It is an insight of the present disclosure that a shuttle can be improved upon via a shallow, directed mutational search with the use of protein language models (PLMs). In recent publications (P. Emami et al., 2023; B. L. Hie et al., 2023), PLMs including ESM-2 (Z. Lin et al., 2022) and ProtBERT (A. Elnaggar et al., 2022) have been shown to possess a zero-shot, or naïve understanding of protein functionality across many families of proteins. It is the insight of the present disclosure that an already good High Throughput in Vivo screening (HTV)-informed hit can be further optimized and diversified using AI (e.g., PLMs), and tested rapidly in vivo again using the technologies disclosed herein (see FIG. 31). This process repeated more and more times can generate a rich dataset to fine-tune existing PLMs to engineer shuttles with optimal properties. In some embodiments, this is referred to as “learning the shuttle-protein-manifold”.

[0775] Initially, in silico experiments were conducted using ESM-2 and ProtBERT to generate scores for every possible single mutation in the sequence of TfR-1409. These scores for mutations were compared across the TfR-1409 sequence to frequencies of those amino acids in publicly available unpaired VH and VHH sequences in the OAS database (T. H. Olsen et al., 2022). It was concluded that ProtBERT scores were better aligned with beneficial VHH mutations.

[0776] In silico sampling was performed with ProtBERT of variant sequences of TfR-1409 at maximum mutational distances in the set {1, 2, 3, . . . , 10}. For each sampling step, the gradient of the score for that sequence was computed with respect to the amino acid identities of each residue, and a new mutation with a probability determined by a categorical distribution derived from this gradient was proposed. Such gradient-based sampling was performed with a modified version of the code provided by P. Emami et al (2023). Notably, while the Emami paper uses gradient-directed MCMC for sampling, implementation of the same herein drops the accept/reject step of MCMC, effectively resulting in a noisy gradient ascent. For more information on the sampling algorithm used to generate variants, see Algorithm 1 in P. Emami et al (2023).

[0777] After generating around 10,000 variants of TfR-1409 and scoring the sequences in silico, duplicate sequences were dropped and the 20 top-scoring variants from each of the 10 possible maximum mutational distances were selected, resulting in a set of 200 variants. Binding curves for 196 of the resulting 200 variants were assayed via BLI. The top 50 binding curves, sorted by fit quality, were selected for advancement to multiplexed in vivo screening (HTV) using the binder barcode platform described herein. Of these 50, 33 variants, including wildtype TfR-1409, were ultimately assayed in vivo. The best-performing variant in vivo was TfR-1409-51.

[0778] Protein language models guided amutagenesis approach to design variants that preserve protein stability and proper folding. A library of AI-designed variants were generated and evaluated using yeast surface display to assess levels of display (as a proxy for stability), target binding, and polyreactivity. Species cross-reactivity and pH sensitivity was also screened at this stage. Next-generation sequencing of the sorted yeast populations was used to select for promising variants that exhibited desired properties (e.g., low polyreactivity, range of affinities) for in vivo screening.

### Results

[0779] FIG. 31 shows a general overview of a described process above. Shuttles such as TfR-1409 were selected from in vivo screening campaigns such as described herein, and iterated through a protein language model, where they are then put back in vivo for further assessment (see also FIG. 32).

[0780] FIG. 33 depicts results of a screen for tested molecules, as described herein, but focusing on just the molecules which are AI improved variants of TfR-1409. As shown in FIG. 33, TfR-1409-51 exhibited relatively increased concentration in brain update (e.g., by 4-times compared to other tested molecules). Several of AI-identified molecules perform worse than the parent sequence by the metric of brain uptake. Unexpectedly, the platform described herein provides actual in vivo performance metrics to identify variant molecules (e.g., shuttles) with improved, desirable properties as described herein.

[0781] FIG. 34 depicts a comparison of in vivo vs in vitro data. X axis and Y axis are an approximation of sequence space as fit with UMAP, while Y represents measure affinity, or brain over serum AUC as described herein. These two scores are poorly correlated, indicating that in vivo data is required for identifying desirable cargo for in vivo outcomes.

[0782] FIG. 35 highlights an observed variation from a validation PK experiment described in Example 26 for TfR-1409 and TfR-1409-51. FIG. 35 shows an increased brain uptake as well as increased parenchymal abundance, highlighting an improvement made with the AI-based approach described herein and a positive correlation with in vivo screening results.

[0783] FIG. 64 depicts plots comparing levels of an IgG either alone (unshuttled) versus fused to shuttle FLT1-49 (parent) or an affinity-optimized variant FLT1-49-41 as quantified by decode analysis. Constructs were examined at 1 mg/kg in a humanized FLT1 mouse model at 6 hr and 24 hr timepoints in a) whole brain preparations, b) parenchymal fractionated samples, and c) serum. These data demonstrate that affinity optimized shuttle variant FLT1-49-41 shows enhanced brain uptake in humanized FLT-1 mouse model.

### Example 28: In Vivo Characterization and Screening of TfR Shuttle- IgG Lecanemab Payload Fusions

[0784] The present example demonstrates a method of screening and characterizing shuttle-payload fusions as described herein. The present example also demonstrates that a binder-barcode platform described herein can be used to assess abundance of a delivered shuttle-cargo polypeptide, for example TfR-IgG lecanemab fusions. Moreover, the present example demonstrates that a binder-barcode platform described herein can be used to identify and/or quantify cargo polypeptides and/or components thereof for certain phenotypes such as expression and/or localization. For example, in some embodiments, shuttle-payload (e.g., shuttle-cargo polypeptides) can be identified and/or assessed for ability to cross the blood-brain barrier (BBB) (e.g., by binding to a BBB surface receptor and inducing transcytosis into the brain) as described by this example. In some embodiments, a shuttle is or comprises a shuttle moiety.

[0785] Other types of cargo components can be assessed using a binder-barcode platform as described herein. Phenotypes other than expression and localization can also be quantified and/or assessed using a binder-barcode platform as described herein. Exemplary phenotypes include epitope properties, affinity, thermostability, pH sensitivity, or other phenotypes described herein.

### Method

### Molecule Construction and Production:

[0786] Heavy and light chain plasmid DNA was combined at a 1:1.5 ratio for symmetrical antibodies or 1:1:3 heavy (knob):heavy (hole):light chain plasmid to a total mass of 40 μg combined with 10 μg salmon sperm DNA. DNA was complexed with Expifectamine293 according to manufacturer recommendations (Gibco) in a transfection volume of 50 mL. Transfected cells were harvested by centrifugation on day 5. 1 mL cell culture supernatant was transferred to a fresh 96-deep well plate containing 10 μL MagSepharose PrismA beads (Cytiva) in three replicates. Supernatants and beads were incubated at 36.5° C. for 1 hour at 1,000 RPM. Beads were collected, washed, and purified antibodies eluted into 120 μL 100 mM glycine, 150 mM sodium chloride, pH 3.2 using the KingFisher Purification System (Thermo Fisher) and neutralized with 15 μL 1 M Sodium Phosphate, pH 7. Purified antibodies were quantified by BCA and evaluated for aggregation by size exclusion chromatography. Antibodies of sufficient quality were combined equimolar by dosing group for pooled purification. Purification was performed on an Akta Pure25 with a HitTrap MabSelect SuRe pcc column at 5 mL/min. Pooled cell culture supernatant was loaded onto the column washed with 20 mM sodium phosphate, 150 mM sodium chloride, 1 pH 7.0 and eluted with 100 mM glycine, 150 mM sodium chloride, pH 3.2 directly into 10% volume of 1M sodium phosphate, pH 7.0. Peak fractions were pooled, concentrated using centrifugal concentrators (10 kDa MWCO, MilliporeSigma). Concentrated antibodies were dialyzed into 20 mM sodium phosphate, 150 mM sodium chloride and diluted to a final concentration of ˜0.5 mg/mL/antibody to dose at 5 mg/kg/antibody (IgG equivalent). Antibody pools were snap frozen in liquid nitrogen and thawed before dosing.

### In Vivo Screening and Characterization:

[0787] Antibodies were pooled into test articles in groups of 5-10 and were injected at 5 mg/kg/antibody. A total of 3 mice per TA group per time point were systemically dosed via tail vein. After 6, 24 and 72 hours, animals were sacrificed and blood was collected in serum separator tubes via cardiac puncture. Prior to organ collection, mice were transcardially perfused with PBS. The brain was divided into two hemispheres and along with muscle, liver, heart and lungs, all tissues were snap frozen and stored at −80° C.

### Tissue Processing:

[0788] One hemisphere of brain tissues (right side) was lysed using TPER (ThermoFisher) buffer with Halt protease inhibitor (ThermoFisher, 1:100) where 1 mL buffer was added to every 150 mg tissue in a TissueLyzer (Qiagen) on at 30 rpm for 7 min using a stainless steel bead of 5 mm (Qiagen). Upon ensuring that the sample is lysed, tubes are centrifuged at 7000 g at 4° C. for 20 min. The supernatant was collected representing the whole brain fraction and was subjected to quantification using decoding protocol described herein.

[0789] For parenchymal extraction, the other brain hemisphere (left) was minced into small pieces with a scalpel in an HBSS buffer containing 10 mM HEPES. The sample was homogenized using a long 21 G cannula (0.8 mm×120 mm) mounted on a 2 mL syringe by aspirating and pushing out 20 times. Homogenate was transferred to 2 mL tubes and centrifuged at 2000 g at 4° C. for 10 min. The supernatant here represents the whole parenchyma while the pellet, when lysed, represents the myelin and vessels fraction. The whole parenchyma was further processed into cell free and cell-associated fractions. For other tissues (muscle, heart, liver and lung), the above-mentioned lysis protocol was followed. All supernatants post-lysis were collected and subjected for quantification through decoding protocol described herein.

### Quantification:

[0790] Molecules were quantified using decoding protocol described herein. Briefly, lysed tissue samples were incubated with the appropriate scFv decoder phage library (1E10 pfu/mL) to bind the barcodes for 2 hours at room temperature (RT) shaking at 600 rpm. Magnetic beads coated with ALFAtag single-domain antibody (ALFA Selector ST, Nanotag Biotechnologies, Germany) were then added at 10 μL per well and incubated shaking at 900 rpm to ensure thorough mixing of beads for 1.5 hours at RT. Beads were then washed four times to remove non-specifically binding phages in 1×PBST (0.10% Tween-20) using a KingFisher bead washing station, after which they were incubated in Trypsin (0.1 μg/mL, Sigma Aldrich) for 1 hour at 37° C. to elute phages off of the beads. The eluate was then added to E. coli TG1 cells (LGC, Biosearch Technologies) in exponential phase (OD600=0.4) and incubated for 1 hour at 37° C., shaking at 1000 rpm. Carbenicillin (120 μg/mL, Sigma Aldrich) and Glucose (1%) were added to LB media (Sigma Aldrich) and 1 mL of this prepared media was added to the bacterial cells infected with phages and incubated shaking at 1000 rpm for 16 hours at 37° C. Samples were then subjected to NGS library preparation where 1 μL of cells were added to Q5 High-Fidelity 2× Master Mix (NEB) with appropriate forward and reverse primers (0.75 μM final concentration) to amplify the scFv decoder insert and libraries were amplified with 13 cycles of PCR. DNA libraries were then indexed with unique dual index primers (i5 and i7) to enable sequencing and the libraries were pooled together post-indexing. Libraries were then purified using SPRI bead purification (CleanNGS DNA purification magnetic beads) using an amount appropriate for the desired size selection and DNA was eluted in a buffer containing 10 mM Tris-HCl (pH 8.0) with 0.1 mM EDTA. DNA libraries were then sequenced with Illumina's NextSeq 2000 sequencer, generating paired end reads of 150 bp. Precise quantification of barcode amounts in the tissue samples from NGS data was enabled by including a standard curve that was decoded with known amounts of protein in commercially purchased (Transnetyx) strain-matched control tissues lysed with the above-mentioned lysis protocol under a larger scale (GentleMacs). A known amount of control phage was also added to every well for normalization of the NGS signal across all the wells thereby enabling accurate and meaningful quantification of barcode amounts in the wells.

### Results

[0791] FIG. 39A shows brain, muscle and serum PK for TfR shuttle variants when fused to lecanemab. Notably, monovalent format (marked as KiH) for 14090-51 improves brain PK and AUC, increasing brain AUC by 10-fold over lecanemab without shuttle. Importantly, several variants which showed strong performance on the Fc-only constructs in Examples 25-27 show poor performance on lecanemab, indicating the importance of testing all shuttle constructs on the payload of interest. The present Example demonstrates that sequences such as those listed in Table 5 can be assessed in accordance with methods described herein.

[0792] FIG. 48 depicts plots showing in vivo PK validation of TfR1 and CD98hc shuttles with a common anti-amyloid beta (Aβ) antibody payload. Shown are shuttled and unshuttled anti-aβ mAbs with timepoints measured at 1, 6, 24, and 72 hours post-injection. The left plot shows kinetics of shuttle TfR-1409-51 with anti-aβ measured in humanized TfR1 mice.

### Example 29: In Vivo Characterization and Screening of TfR Shuttle- aBACE1 Payload Fusions

[0793] The present example demonstrates a method of screening and characterizing shuttle-payload fusions as described herein. The present example also demonstrates that a binder-barcode platform described herein can be used to assess abundance of a delivered shuttle-cargo polypeptide, for example TfR-aBACE1 fusions. Moreover, the present example demonstrates that a binder-barcode platform described herein can be used to identify and/or quantify cargo polypeptides and/or components thereof for certain phenotypes such as expression and/or localization. For example, in some embodiments, shuttle-payload (e.g., shuttle-cargo polypeptides) can be identified and/or assessed for ability to cross the blood-brain barrier (BBB) (e.g., by binding to a BBB surface receptor and inducing transcytosis into the brain) as described by this example. In some embodiments, a shuttle is or comprises a shuttle moiety.

[0794] Other types of cargo components can be assessed using a binder-barcode platform as described herein. Phenotypes other than expression and localization can also be quantified and/or assessed using a binder-barcode platform as described herein. Exemplary phenotypes include epitope properties, affinity, thermostability, pH sensitivity, or other phenotypes described herein.

### Method

### Molecule Construction and Production:

[0795] Heavy and light chain plasmid DNA was combined at a 1:1.5 ratio for symmetrical antibodies or 1:1:3 heavy (knob):heavy (hole):light chain plasmid to a total mass of 0.8 μg per mL of transfection combined with 0.2 μg salmon sperm DNA per mL of transfection. DNA was complexed with Expifectamine293 (Gibco) according to manufacturer recommendations. Transfected cells were harvested by centrifugation on day 5. Purification was performed on an Akta Pure25 with a HitTrap MabSelect SuRe pcc column at 5 mL/min. Cell culture supernatant was loaded onto the column washed with 20 mM sodium phosphate, 150 mM sodium chloride, 1 pH 7.0 and eluted with 100 mM glycine, 150 mM sodium chloride, pH 3.2 directly into 10% volume of 1M sodium phosphate, pH 7.0. Peak fractions were pooled, concentrated using centrifugal concentrators (10 kDa MWCO, MilliporeSigma). Concentrated antibodies were dialyzed into 20 mM sodium phosphate, 150 mM sodium chloride and diluted to a final concentration of ˜5 mg/mL to dose at 50 mg/kg/antibody (IgG equivalent). Antibodies were snap frozen in liquid nitrogen and thawed before dosing.

### Dosing, Blood, and Tissue Collections:

[0796] All mouse studies utilized hTfR females (Biocytongen). Mice were IV dosed via the tail vein with 30 mg/kg or 50 mg/kg of test articles.

[0797] At terminal sacrifice, blood (˜500 μL) was collected via cardiac puncture. Blood was collected in EDTA tubes to prevent clotting and spun at 14000 g for 10 min. After blood collection, mice were transcardially perfused with PBS. Fresh-frozen brain tissue was homogenized using a Qiagen TissueLyser with 5 mm steel beads for 7 min at 30 Hz in 500 uL of RIPA lysis buffer+HALT protease inhibitors (100×) for 150 mg of brain tissue.

### Human IgG ELISA:

[0798] IgG antibody concentrations in mouse plasma and brain lysates were quantified using a generic human IgG assay (ab195215. AbCam) following the manufacturer's instructions. Plasma was diluted 1:20000 and 1:40000 in a sample diluent provided with the ELISA kit. Similarly, brain lysates were diluted 1:2 and 1:5 for analysis of huIgG concentration. Briefly, samples and standard curves were incubated with an antibody cocktail for 40 minutes at room temperature on a plate shaker set to 400 rpm. After washes, a TMB Development Solution was added to each well and the reaction was stopped with the addition of a Stop Solution to each well. Absorbance was measured at 450 nm in a plate reader. The standard curve was fit using a linear logistic regression.

### Mouse Aβ40 ELISA:

[0799] For PD evaluation, brains were extracted after perfusion and hemi-brains were isolated for homogenization in 8× by tissue weight of 5 M GuHCl and incubated under rotation for 3 hours at 4 C. These lysates were further diluted 1:10 with dilution Buffer for Guanidine. Samples were then spun at 14,000 rpm for 20 min at 4 C, and supernatants were isolated for mouse Abeta-40 measurements. MaxiSorp plate was coated overnight with the polyclonal capture antibody specific for the C-terminus of the Aβ40 peptide (Millipore #AB5074P) at 4 C. After blocking was performed with 200 μL of blocking buffer (2% BSA, 7.5 g/L glycine in PBS) for 1 h at room temperature. Diluted guanidine brain lysates samples and peptide standards were loaded on the plate and added concurrently with the biotinylated primary β-Amyloid, 1-16 (Biolegend 805703) antibody followed by a High Sensitivity Streptavidin-HRP (Thermo Fisher P121130) secondary antibody. Following another four washes, 100 μL of TMB was added to each well. Plates were incubated in the dark for 30 min at room temperature, then the reaction was terminated by the addition of 50 μL of H2SO4 (20% v/v) (Stop Solution). Absorbance values at 450 nm were measured using a Bio-Rad Microplate Reader. Assay sensitivity was <300 pg/mL for both Aβ40 and Aβ42.

### Results

[0800] FIG. 35 shows quantification of aB-40 (i.e., Aβ40) in the brain at 24 hours for the measured constructs. Notably, monovalent TfR-1409-51 shows a performance with desirable properties as compared to benchmarks or its bivalent version.

[0801] FIG. 36 highlights that monovalent TfR-1409-51-aBACE1 has improved PK properties in addition to brain uptake relative to other molecules tested.

[0802] FIG. 37 shows brain IgG concentration at 24 hours, interestingly Denali(mono)aBACE1 has high brain uptake, but does not significantly knock down aβ40.

[0803] FIG. 50 shows plots of brain uptake and functional activity of an anti-BACE1 antibody alone or shuttled by MB-TfR-1409-51 versus benchmarks in humanized TfR1 mice at 24 hrs post-injection. Column 1 from left shows format of unshuttled anti-BACE1 control mAb and the shuttled MB-TfR-1409-51 construct. Column 2 from left shows levels of antibody for each construct measured in whole brain using ELISA. Column 3 from left shows levels of antibody for each construct measured in plasma using ELISA. Column 4 from left shows levels of Aβ40 for each construct measured in brain using ELISA.

### Example 30: In Vivo Detection of TfR Shuttle-aBACE1 Payload Fusions

[0804] The present example demonstrates in vivo characterization of shuttle-payload fusions as described herein. Specifically, the present example demonstrates immunofluorescence detection of the TfR-1409-51-aBACE1 construct in specific brain regions.

### Method

### In Vivo Detection:

[0805] hTfR mice were IV dosed via the tail vein with 30 mg/kg or 50 mg/kg of test articles. 24 hours after dosing, animals were perfused by PBS and brains were extracted, drop-fixed in 4% paraformaldehyde overnight at 4 C followed by 30% sucrose overnight at 4 C. Brains were then sectioned at 35 μm on a sliding cryostat, blocked in 5% NDS (Normal Donkey Serum), 10% of Triton in PBS for 1 hour at room temperature and stained with NeuN (Rabbit monoclonal anti-NeuN antibody (1:500, Abcam ab177487) overnight at 4 C in blocking buffer. After overnight incubation, sections were washed in PBS and and incubation with Alexa Fluor® 594 AffiniPure Donkey Anti-Rabbit IgG (H+L) (1:200) Jackson 711-585-152) and Alexa Fluor® 488 AffiniPure Donkey Anti-Human IgG (H+L) (1:200) (Jackson 709-545-149) at room temperature for 2 hours.

[0806] Brain sections were washed in PBS then mounted on slides using Prolong Glass Antifade Mountant and imaged using a Zeiss Axioscan scope (20×/0.8 air objective).

### Results

[0807] FIG. 38 shows that TfR-1409-51-aBACE1 monovalent at 24 hours exhibits the highest global brain staining when directly compared head-to-head to several TfR benchmark molecules.

### Example 31: Multiplexed In Vivo Screening and Assessment of Phenotypes of Shuttles to Different Targets Using Binder-Barcode Platform

[0808] The present example demonstrates a method to perform multiplexed in vivo screening and assessment of phenotypes of shuttles (e.g., brain shuttle moieties) designed to target multiple different targets (or “cell-receptor agents” or “portals”) of interest in a high-throughput format using a binder-barcode platform described herein. For example, in some embodiments, multiple shuttles (e.g., shuttle moieties) can be identified and/or assessed simultaneously using a binder-barcode platform described herein as described by this example. In some embodiments, targets, for example, as identified in this Example, may be nominated by a sophisticated nomination criteria including public scRNA-seq datasets for specific cell types (e.g., brain cell). Additionally, in some embodiments, targets, for example, as identified in this Example, may be nominated by computational predictions of homology, cell surface expression, and/or other proprietary determinants. In some embodiments, a shuttle is or comprises a shuttle moiety. In some embodiments, a phenotype includes pharmacokinetic (or clearance) data as described herein.

### Method

### Molecule Construction and Production:

[0809] 350 VHH molecules selected for the binding properties to seven different targets namely CD98, FLT1, LDLR1, InsulinR, IGF1R, SCARB1, LRP1 were produced as C-terminal Fc fusions. A person having ordinary skill in the art would appreciate that other molecules can be selected for binding to a variety of targets in a multiplexed, high-throughput screen according to embodiments of the present disclosure.

[0810] Plasmid backbone, VHH, or Barcode gene fragment was PCR amplified using 5 ng of template DNA. Forward and reverse primer (250 nM final concentration) was combined with Q5 High-Fidelity Master Mix (1× final concentration, NEB) and amplified for 30 cycles. Plasmid backbone PCR product was purified with Nucleospin PCR Cleanup Kit (Machery Nagel). 7 μg purified, linear plasmid backbone was digested for 2 hours at 37° C. with FastDigest DpnI (Invitrogen) before heat inactivation and SPRI purification (Bulldog Bio). 25 ng backbone DNA were combined 1:3 with insert DNA and HiFi Assembly Master Mix (lx final concentration, NEB). Assembly reaction was incubated for 1 hour at 50° C. 2.5 ng assembled plasmid product was used as the template for PCR amplification. 500 ng PCR amplified DNA was complexed with Expifectamine293 according to manufacturer recommendations (Gibco) in a transfection volume of 800 μL in 12 replicates. Transfected cells were harvested by centrifugation on day 5. 800 μL of cell culture supernatant was transferred to a fresh 96-deep well plate containing 10 μL MagSepharose PrismA beads (Cytiva). Supernatants and beads were incubated at 36.5° C. for 1 hour at 1,000 RPM. Beads were collected, washed, and purified antibodies eluted into 120 μL 100 mM glycine, 150 mM sodium chloride, pH 3.2 using the KingFisher Purification System (Thermo Fisher) and neutralized with 12.5 μL 1 M Sodium Phosphate, pH 7. Purified antibodies were quantified by BCA before pooling at the appropriate mass to achieve 1, 2.5, or 5 mg/kg dosing (IgG equivalent) and concentrated using centrifugal concentrators (10 kDa MWCO, MilliporeSigma) to a final volume of 1050 μL. Final concentration of the pooled antibodies was measured by BCA. Antibody pools were snap frozen in liquid nitrogen and thawed before dosing.

### In Vivo Screening:

[0811] Antibodies were pooled into test articles in groups of 50-100 and were injected at 1 mg/kg/antibody. A total of 3 mice per TA group were systemically dosed via tail vein. After 72 hours, animals were sacrificed and blood was collected in serum separator tubes via cardiac puncture. Prior to organ collection, mice were transcardially perfused with PBS. The brain was divided into two hemispheres and along with muscle, liver, heart and lungs, all tissues were snap frozen and stored at −80° C.

### Tissue Processing:

[0812] One hemisphere of brain tissues (right side) was lysed using TPER (ThermoFisher) buffer with Halt protease inhibitor (ThermoFisher, 1:100) where 1 mL buffer was added to every 150 mg tissue in a TissueLyzer (Qiagen) on at 30 rpm for 7 min using a stainless steel bead of 5 mm (Qiagen). Upon ensuring that the sample is lysed, tubes are centrifuged at 7000 g at 4° C. for 20 min. The supernatant was collected representing the whole brain fraction and was subjected to quantification using decoding protocol described herein.

[0813] For parenchymal extraction, the other brain hemisphere (left) was minced into small pieces with a scalpel in an HBSS buffer containing 10 mM HEPES. The sample was homogenized using a long 21 G cannula (0.8 mm×120 mm) mounted on a 2 mL syringe by aspirating and pushing out 20 times. Homogenate was transferred to 2 mL tubes and centrifuged at 2000 g at 4° C. for 10 min. The supernatant here represents the whole parenchyma while the pellet, when lysed, represents the myelin and vessels fraction. The whole parenchyma was further processed into cell free and cell-associated fractions. For other tissues (muscle, heart, liver and lung), the above-mentioned lysis protocol was followed. All supernatants post-lysis were collected and subjected for quantification through decoding protocol described herein.

### Quantification:

[0814] Molecules were quantified using decoding protocol described herein. Briefly, lysed tissue samples were incubated with magnetic beads coated with ALFAtag single-domain antibody (ALFA Selector ST, Nanotag Biotechnologies, Germany) added at 10 μL per well and incubated shaking at 900 rpm to ensure thorough mixing of beads for 1.5 hours at room temperature (RT), plates were then moved to 4° C. to continue capturing overnight. Beads were washed once with 1×PBS and the appropriate scFv decoder phage library (1E10 pfu/mL) was added to bind the barcodes for 2 hours at RT, shaking at 900 rpm. Beads were then washed three times to remove non-specifically binding phages in 1×PBST (0.1% Tween-20) using an extractor shield to carefully transfer the beads to each wash plate. After the final wash, beads were incubated in Trypsin (0.1 μg/mL, Sigma Aldrich) for 1 hour at 37° C. to elute phages off of the beads. The eluate was then added to E. coli TG1 cells (LGC, Biosearch Technologies) in exponential phase (OD600=0.4) and incubated for 1 hour at 37° C., shaking at 1000 rpm. Carbenicillin (120 μg/mL, Sigma Aldrich) and Glucose (1%) were added to LB media (Sigma Aldrich) and 1 mL of this prepared media was added to the bacterial cells infected with phages and incubated shaking at 1000 rpm for 16 hours at 37° C. Samples were then subjected to NGS library preparation where 1 μL of cells were added to Q5 High-Fidelity 2× Master Mix (NEB) with appropriate forward and reverse primers (0.75 μM final concentration) to amplify the scFv decoder insert and libraries were amplified with 13 cycles of PCR. DNA libraries were then indexed with unique dual index primers (i5 and i7) to enable sequencing and the libraries were pooled together post-indexing. Libraries were then purified using SPRI bead purification (CleanNGS DNA purification magnetic beads) using an amount appropriate for the desired size selection and DNA was eluted in a buffer containing 10 mM Tris-HCl (pH 8.0) with 0.1 mM EDTA. DNA libraries were then sequenced with Illumina's NextSeq 2000 sequencer, generating paired end reads of 150 bp. Precise quantification of barcode amounts in the tissue samples from NGS data was enabled by including a standard curve that was decoded with known amounts of protein in commercially purchased (Transnetyx) strain-matched control tissues lysed with the above-mentioned lysis protocol under a larger scale (GentleMacs). A known amount of control phage was also added to every well for normalization of the NGS signal across all the wells thereby enabling accurate and meaningful quantification of barcode amounts in the wells. See FIG. 40A.

### Acute Symptom Evaluation:

[0815] Wild-type (C57), hTfR1, or hVEGFR1 mice were administered a single dose of respective treatment and returned to their home cage for acute sign observations by a blinded experimenter. Observations were recorded for up to 30 minutes post-injection, focusing on clinical symptoms such as post-dose lethargy, rough coat appearance, hunching, and occasional limb or whole-body spastic movements. After the 30-minute observation period, mice were returned to their racks, and a second round of observations began 3 hours post-dose. Any symptoms noted during the initial round of observations were re-evaluated during this second round, and these were completely reversed at this time.

### Results

[0816] FIG. 40B depicts brain concentration vs serum for a subset of molecules screened. The bottom line depicts 0.1% brain/serum concentration, and the upper line displays 1%. Hits are selected for increased brain uptake properties from the given comparisons.

[0817] FIG. 40C show data related to CD98, using a humanized CD98 mouse. Hits were selected similarly as above based on ratio of brain/serum concentration.

[0818] FIG. 47A-47D depicts plots showing multiplexed in vivo screening data of shuttle candidates. The diagonal lines with percentages denote brain/serum ratios. FIG. 47A depicts plots related to protein-barcoded anti-TfR1 nanobodies screened in multiplex in humanized TfR1 mice (n=3), with takedown and analysis of serum and whole-brain tissue conducted at 24 hrs post-injection. A total of 250 total molecules were screened and those nanobodies detected in brain are shown. FIG. 47B depicts plots related to protein-barcoded anti-CD98hc nanobodies screened in multiplex in humanized CD98hc mice (n=3), with takedown and analysis of serum and whole-brain tissue conducted at 72 hrs post-injection. FIG. 47C depicts plots related to 295 protein-barcoded nanobodies directed to additional unique (e.g., not previously known) targets (n=7) screened in multiplex in C57 mice, with takedown and analysis of serum and whole-brain tissue conducted at 72 hrs post-injection. Each color represents a unique (e.g., not previously known) target. FIG. 47D depicts plots related to 30 protein-barcoded nanobodies against FLT1 screened in multiplex in C57 mice (n=3), with takedown and analysis of serum and whole-brain tissue conducted at 72 hrs post-injection. Three putative shuttle hits (green stars) were identified with a brain/serum ratio greater than 1%, while the remaining FLT1 shuttle candidates showed little/no brain exposure (red circles). Shuttle candidates against other targets (open circles) are left for reference.

[0819] FIG. 52 shows a summary of TfR, CD98, and FLT1 expression profiles. The profiles show that FLT1 and CD98 are supportive of improved tolerability and efficacy for shuttled anti-aβ cargos.

[0820] FIG. 55 shows gene expression profiles across various cell types and tissues determined using publicly available scRNA-Seq datasets. Exemplary targets (TfR, CD98, and FLT1) for brain shuttling were nominated based on favorable gene expression profiles, including enrichment on brain endothelial cells plus relatively low expression on peripheral targets (see also FIG. 66).

[0821] FIG. 56 shows a plot of total reticulocyte count 24 hours after intravenous injection of constructs at 5 mg/kg (n=3-8 mice per group). Anti-Aβ antibody shuttled with FLT1-49 or CD98-11 does not impact reticulocyte counts, relative to unshuttled anti-Aβ antibody (see also FIG. 65).

[0822] FIG. 67 shows a comparison of acute symptoms in mice following administration of the indicated treatment at the indicated dose level. Wild-type (C57), hTfR1, or hVEGFR1 mice were administered a single dose of Vehicle, IgG (30 mg/kg), Benchmark TfR-shuttled Anti-Aβ(30 mg/kg) or FLT1-49-shuttled Anti-Aβ (30 mg/kg) and observed for acute symptoms by a blinded experimenter.

### Example 32: Multiplexed In Vivo Characterization of Shuttle-IgG Lecanemab Fusions to Different Targets Using Binder-Barcode Platform

[0823] The present example demonstrates a method to perform multiplexed in vivo characterization of shuttle-IgG fusions (e.g., shuttle-cargo polypeptides as described herein) designed to target seven different targets of interest using a binder-barcode platform described herein. For example, in some embodiments, multiple shuttle-IgG fusions (e.g., shuttle-cargo polypeptides as described herein) can be identified and/or assessed simultaneously using a binder-barcode platform described herein as described by this example. For example, shuttle-IgG fusions can be identified and/or assessed for brain enrichment. Shuttle-IgG fusions can be selected based on increased concentration in brain cell(s) relative to other cell(s) (e.g., serum). In some embodiments, a shuttle is or comprises a shuttle moiety.

### Method

### Molecule Construction and Production:

[0824] Heavy and light chain plasmid DNA was combined at a 1:1.5 ratio for heavy:light chain plasmid to a total mass of 68 μg combined with 12 μg salmon sperm DNA. DNA was complexed with Expifectamine293 according to manufacturer recommendations (Gibco) in a transfection volume of 85 mL. Transfected cells were harvested by centrifugation on day 5. 1 mL cell culture supernatant was transferred to a fresh 96-deep well plate containing 10 μL MagSepharose PrismA beads (Cytiva) in three replicates. Supernatants and beads were incubated at 36.5° C. for 1 hour at 1,000 RPM. Beads were collected, washed, and purified antibodies eluted into 120 μL 100 mM glycine, 150 mM sodium chloride, pH 3.2 using the KingFisher Purification System (Thermo Fisher) and neutralized with 15 μL 1 M Sodium Phosphate, pH 7. Purified antibodies were quantified by BCA and evaluated for aggregation by size exclusion chromatography. Antibodies of sufficient quality were combined equimolar by dosing group for pooled purification. Purification was performed on an Akta Pure25 with a HitTrap MabSelect SuRe pcc column at 5 mL/min. Pooled cell culture supernatant was loaded onto the column washed with 20 mM sodium phosphate, 150 mM sodium chloride, 1 pH 7.0 and eluted with 100 mM glycine, 150 mM sodium chloride, pH 3.2 directly into 10% volume of 1M sodium phosphate, pH 7.0. Peak fractions were pooled, concentrated using centrifugal concentrators (10 kDa MWCO, MilliporeSigma). Concentrated antibodies were dialyzed into 20 mM sodium phosphate, 150 mM sodium chloride and diluted to a final concentration of ˜0.5 mg/mL/antibody to dose at 5 mg/kg/antibody (IgG equivalent). Antibody pools were snap frozen in liquid nitrogen and thawed before dosing.

### CD98 Binding Kinetics:

[0825] Purified bispecific antibodies were diluted to a final concentration to 5 μg/mL in 1×PBS, 0.5% BSA, 0.05 Tween20 (kinetics buffer) and transferred to the assay plate. HIS-tagged human CD98 was prepared in a 7-point, 2-fold serial dilution starting at 500 nM to 7.8125 nM with a 0 nM control) and transferred to the assay plate. Anti-human IgG Capture biosensors (Version 2, Sartorius) were pre-equilibrated in kinetics buffer for 20 minutes before the start of the assay. At the start of the assay, baseline signal was measured for 1 minute in kinetics buffer before capturing diluted antibodies for 5 minutes. Antibody coated sensors were re-equilibrated in kinetics buffer before measuring binding association for 5 minutes in the serial dilution of CD98 and dissociation for 5 minutes in kinetics buffer. Binding kinetics were fit using a 1:1 binding model and global fit across all concentrations.

### In Vivo Screening:

[0826] Antibodies were pooled into test articles in groups of 10-20 and were injected at 5 mg/kg/antibody. A total of 3 mice per TA group per time point were systemically dosed via tail vein. After 6, 24 and 72 hours, animals were sacrificed and blood was collected in serum separator tubes via cardiac puncture. Prior to organ collection, mice were transcardially perfused with PBS. The brain was divided into two hemispheres and along with muscle, liver, heart and lungs, all tissues were snap frozen and stored at −80° C.

### Tissue Processing:

[0827] One hemisphere of brain tissues (right side) was lysed using TPER (ThermoFisher) buffer with Halt protease inhibitor (ThermoFisher, 1:100) where 1 mL buffer was added to every 150 mg tissue in a TissueLyzer (Qiagen) on at 30 rpm for 7 min using a stainless steel bead of 5 mm (Qiagen). Upon ensuring that the sample is lysed, tubes are centrifuged at 7000 g at 4° C. for 20 min. The supernatant was collected representing the whole brain fraction and was subjected to quantification using decoding protocol described herein.

[0828] For parenchymal extraction, the other brain hemisphere (left) was minced into small pieces with a scalpel in an HBSS buffer containing 10 mM HEPES. The sample was homogenized using a long 21 G cannula (0.8 mm×120 mm) mounted on a 2 mL syringe by aspirating and pushing out 20 times. Homogenate was transferred to 2 mL tubes and centrifuged at 2000 g at 4° C. for 10 min. Supernatant here represents the whole parenchyma while the pellet, when lysed, represents the myelin and vessels fraction. Whole parenchyma was further processed into cell free and cell-associated fractions. For other tissues (muscle, heart, liver and lung), the above-mentioned lysis protocol was followed. All supernatants post-lysis were collected and subjected for quantification through decoding protocol described herein.

### Quantification:

[0829] Molecules were quantified using decoding protocol described herein. Briefly, lysed tissue samples were incubated with the appropriate scFv decoder phage library (1E10 pfu/mL) to bind the barcodes for 2 hours at room temperature (RT) shaking at 600 rpm. Magnetic beads coated with ALFAtag single-domain antibody (ALFA Selector ST, Nanotag Biotechnologies, Germany) were then added at 10 μL per well and incubated shaking at 900 rpm to ensure thorough mixing of beads for 1.5 hours at RT. Beads were then washed four times to remove non-specifically binding phages in 1×PBST (0.1% Tween-20) using a KingFisher bead washing station, after which they were incubated in Trypsin (0.1 μg/mL, Sigma Aldrich) for 1 hour at 37° C. to elute phages off of the beads. The eluate was then added to E. coli TG1 cells (LGC, Biosearch Technologies) in exponential phase (OD600=0.4) and incubated for 1 hour at 37° C., shaking at 1000 rpm. Carbenicillin (120 μg/mL, Sigma Aldrich) and Glucose (1%) were added to LB media (Sigma Aldrich) and 1 mL of this prepared media was added to the bacterial cells infected with phages and incubated shaking at 1000 rpm for 16 hours at 37° C. Samples were then subjected to NGS library preparation where 1 μL of cells were added to Q5 High-Fidelity 2× Master Mix (NEB) with appropriate forward and reverse primers (0.75 μM final concentration) to amplify the scFv decoder insert and libraries were amplified with 13 cycles of PCR. DNA libraries were then indexed with unique dual index primers (i5 and i7) to enable sequencing and the libraries were pooled together post-indexing. Libraries were then purified using SPRI bead purification (CleanNGS DNA purification magnetic beads) using an amount appropriate for the desired size selection and DNA was eluted in a buffer containing 10 mM Tris-HCl (pH 8.0) with 0.1 mM EDTA. DNA libraries were then sequenced with Illumina's NextSeq 2000 sequencer, generating paired end reads of 150 bp. Precise quantification of barcode amounts in the tissue samples from NGS data was enabled by including a standard curve that was decoded with known amounts of protein in commercially purchased (Transnetyx) strain-matched control tissues lysed with the above-mentioned lysis protocol under a larger scale (GentleMacs). A known amount of control phage was also added to every well for normalization of the NGS signal across all the wells thereby enabling accurate and meaningful quantification of barcode amounts in the wells.

### Results

[0830] FIG. 41 shows affinities for CD98 targets. Notably, affinity is poorly correlated with the PK for molecules shown in FIG. 43. Lecanemab when fused to shuttle CD98-11 showed increased PK in the serum as well as increased brain uptake, with a brain residence time. Other interesting molecules identified by the present Example included FLT1-49, a shuttle targeting FLT1, which when fused to lecanemab showed approximately 4-fold improved AUC when compared to lecanemab alone. FIGS. 42A-42C depicts plots showing PK data for tested fusion proteins (e.g., shuttle-cargo polypeptides). FIG. 42A depicts plots showing PK data for shuttle-cargo fusion proteins for brain tissue (X-axis shows time in hours and Y-axis shows PK concentration in nM). FIG. 42B depicts plots showing PK data for shuttle-cargo fusion proteins for serum (X-axis shows time in hours and Y-axis shows PK concentration in nM). FIG. 42C shows AUC values for the tested shuttle-cargo fusion proteins to un-shuttled lecanemab. Several molecules showed varied phenotypes when compared to the Fc based constructs screen, likely due to the effects lecanemab has on PK, and highlighting an important feature of in vivo quantification across several shuttle constructs on the payload of interest.

[0831] FIG. 48 depicts plots showing in vivo PK validation of TfR1 and CD98hc shuttles with a common anti-amyloid beta (Aβ) antibody payload. Shown are shuttled and unshuttled anti-aβ mAbs with timepoints measured at 1, 6, 24, and 72 hours post-injection. The right plot shows kinetics of shuttle CD98-11 with anti-aβ measured in humanized CD98hc mice.

[0832] FIG. 49 depicts plots showing in vivo PK validation of a unique (e.g., not previously known) target FLT1 using shuttle FLT1-49 in C57 mice. Shown are shuttled and unshuttled anti-aβ mAbs with timepoints measured at 1, 6, 24, and 72 hours post-injection. The left plot shows quantitation of FLT1-49 in whole-brain. The right plot shows quantitation of FLT1-49 in parenchymal-extracted tissues. This data demonstrates that FLT1 is safer and more effective than other shuttle Aβ therapies. Additionally, FLT1, a BBB endothelial cell membrane protein appears to possess the optimal properties for shuttling an anti-Aβ antibody cargo to the brain to treat various diseases, including Alzheimer's. For example, in some embodiments, its properties include enriched on brain endothelial cells, low expression on other brain cells, low expression on other common sites of toxicity (e.g., erythroid precursors), and fast Parenchymal uptake (see FIG. 49 right plot).

[0833] FIG. 70 depicts plots showing pharmacokinetic (PK) profiles of selected TfR shuttles (blue) vs two unshuttled controls (gray and black) across serum, brain tissue, and corresponding brain to serum ratio as measured in humanized TfR mice. These data demonstrate that multiple exemplary TfR shuttles show brain enrichment vs unshuttled controls in humanized TfR mice.

[0834] FIG. 71 depicts plots showing pharmacokinetic (PK) profiles of selected CD98 shuttles (blue) vs two unshuttled controls (gray and black) across serum, brain tissue, and corresponding brain to serum ratio as measured in humanized CD98 mice. These data demonstrate that multiple exemplary CD98 shuttles show brain enrichment vs unshuttled controls in humanized CD98 mice.

[0835] FIG. 72 depicts plots showing pharmacokinetic (PK) profiles of selected FLT1 shuttles (blue) vs two unshuttled controls (gray and black) across serum, brain tissue, and corresponding brain to serum ratio as measured in humanized FLT1 mice. These data demonstrate that multiple exemplary FLT1 shuttles show brain enrichment vs unshuttled controls in humanized FLT1 mice.

### Example 33: Characterization of Shuttle-aBACE1 Fusion Competition with Transferrin (Tf) for Binding to TfR Using Binder-Barcode Platform

[0836] The present example demonstrates a method to characterize shuttle-cargo polypeptides in a competition assay.

### Method

### Molecule Construction and Production:

[0837] Heavy and light chain plasmid DNA was combined at a 1:1.5 heavy:light chain plasmid ratio for symmetrical antibodies or 1:1:3 heavy (knob):heavy (hole):light chain plasmid ratio for asymmetrical antibodies to a total mass of 0.8 μg per mL of transfection, combined with 0.2 μg salmon sperm DNA per mL of transfection. DNA was complexed with Expifectamine293 (Gibco) according to manufacturer recommendations. Transfected cells were harvested by centrifugation on day 5. 800 μL of cell culture supernatant was transferred to a fresh 96-deep well plate containing 12.5 μL MagSepharose PrismA beads (Cytiva). Supernatants and beads were incubated at 36.5° C. for 1 hour at 1,000 RPM. Beads were collected, washed, and purified antibodies eluted into 120 μL 100 mM glycine, 150 mM sodium chloride, pH 3.2 using the KingFisher Purification System (Thermo Fisher) and neutralized with 15 μL 1 M Sodium Phosphate, pH 7. Purified antibodies were quantified by BCA, snap frozen in liquid nitrogen, and thawed prior to use.

### TfR Competition ELISAs:

[0838] For the study showing variant TfR-1409-51 binding to TfR, rh-TfR was added to a Maxisorp Nunc plate at a concentration of 5 μg/ml and at a volume of 100 μL/well, then incubated at 4 C on plate shaker overnight. After decanting and washing 3× with PBST, the plate was blocked by adding 100 μL of PBST (0.1% Tween)+2% BSA to each well for 1 h at RT on the plate shaker. A TfR-1409-51×aBACE1 bispecific antibody construct was prepared in either PBST (0.05% Tween) or PBST+1 μM transferrin. TfR×aBACE1 was prepared at a starting concentration of 1 μM and serially diluted 1:3 in the relevant buffer solution. Following plate blocking, plates were decanted and washed 3× with PBST prior to addition of TfR×aBACE1 dilutions and incubation on the plate shaker for 1 h at RT. After decanting and washing 3× with PBST, aIgG-HRP was added at a dilution of 1:2000 for 1 h at RT. ELISA plates were developed via TMB substrate and absorbance read at 450 nm.

[0839] For the study showing Tf binding to TfR, rh-TfR was added to a Maxisorp Nunc plate at a concentration of 5 μg/ml and at a volume of 100 μL/well, then incubated at 4 C on plate shaker overnight. After decanting and washing 3× with PBST, the plate was blocked by adding 100 μL of PBST+2% BSA to each well for 1 h at RT on the plate shaker. A TfR-1409-51×aBACE1 bispecific antibody construct was prepared in PBS at a concentration of 1 uM. Following plate blocking, plates were decanted and washed 3× with PBST prior to addition of either 100 μL TfR×aBACE1 solution or 100 μL PBS control, then incubated on the plate shaker for 1 h at RT. Biotinylated Tf was prepared at a starting concentration of 400 nM and serially diluted 1:3 in PBS. 5 ul of biotinylated Tf dilutions were directly added ELISA wells without washing, for ˜20× dilution and a maximum concentration of 20 nM biotinylated Tf, then incubated on the plate shaker for 1 h at RT. After decanting and washing 3× with PBST, streptavidin-HRP was added at a dilution of 1:4000 for 1 h at RT. ELISA plates were developed via TMB substrate and absorbance read at 450 nm.

### Results

[0840] FIG. 45 shows that binding to TfR by TfR-1409-51 was reduced in the presence of Tf, however the inverse was not true. This model demonstrated that Tf should remain bioactive in the presence of TfR-1409-51, reducing the risk of toxicity, but that TfR-1409-51 may share an overlapping epitope with Tf. This partial competition of Tf may be responsible for in vivo phenotypes described herein.

### Example 34: Multiplexed In Vitro Evaluation of Therapeutic Antibodies Associated with Shuttles

[0841] The present example demonstrates multiplexed in vitro evaluation of multiple therapeutic antibodies associated multiple shuttles (e.g., shuttle moieties). In some embodiments, a shuttle is or comprises a shuttle moiety.

### Method

### Molecule Construction and Production:

[0842] Heavy and light chain plasmid DNA was combined at a 1:1.5 ratio for symmetrical antibodies or 1:1:3 heavy (knob):heavy (hole):light chain plasmid to a total mass of 0.8 μg per mL of transfection combined with 0.2 μg salmon sperm DNA per mL of transfection. DNA was complexed with Expifectamine293 (Gibco) according to manufacturer recommendations. Transfected cells were harvested by centrifugation on day 5. 800 μL of cell culture supernatant was transferred to a fresh 96-deep well plate containing 12.5 μL MagSepharose PrismA beads (Cytiva). Supernatants and beads were incubated at 36.5° C. for 1 hour at 1,000 RPM. Beads were collected, washed, and purified antibodies eluted into 120 μL 100 mM glycine, 150 mM sodium chloride, pH 3.2 using the KingFisher Purification System (Thermo Fisher) and neutralized with 15 μL 1 M Sodium Phosphate, pH 7. Purified antibodies were quantified by BCA, snap frozen in liquid nitrogen, and thawed prior to use.

aBeta (Aβ) Binding ELISA:

[0843] Pre-formed aBeta fibrils were purchased and diluted to a concentration of 2.5 μg/ml prior to addition to Maxisorp Nunc plates, then incubated on a plate shaker for 2 h at RT. After decanting and washing 3× with PBST, the plate was blocked by adding 200 μL of PBST+2% BSA to each well for 1 h at RT on the plate shaker. Test constructs were prepared at a starting concentration of 10 nM and serially diluted 1:3 in PBST+2% BSA. Following plate blocking, plates were decanted and washed 3× with PBST prior to addition of test construct solutions and incubated on the plate shaker for 1 h at RT. After decanting and washing 3× with PBST, aIgG-HRP was added at a dilution of 1:2000 for 1 h at RT. ELISA plates were developed via TMAB substrate and absorbance read at 450 nm.

### ADCC Assays:

[0844] The ADCC reporter bioassay kit from Promega, based on an NFAT luciferase readout, was used to evaluate the activity of test constructs. Assay buffer was comprised of RPMI 1640+4% low IgG serum. Raji cells were plated at 12,500 cells/well on white 96 well assay plates in 25 μL assay buffer/well. Test construct serial dilutions were prepared at a starting concentration of 10 nM and serially diluted 1:3 in 25 μL assay buffer/well. 75,000 effector Jurkat cells were subsequently added in 25 μL assay buffer. Plates were incubated at 37 C+5% CO2 for 3 h. To develop and read luminescence signal, assay plates were removed from the incubator and equilibrated to RT for 15 min. 75 ul of Bio-Glo was added to each well and incubated at RT for 5 min, then luminescence read on a plate reader, using the setting for opaque 96 well plates (integration of 500 ms and gain of 120-135).

### Results

[0845] FIG. 43 shows aBeta binding of two different anti-aBeta antibodies (gantenerumab and lecanemab) fused to brain shuttle VHH domains. While binding EC50 was significantly reduced for gantenerumab following fusion with TfR-1409-51, lecanemab fusion affinities remained within ˜5-fold of parental lecanemab across all evaluated VHH fusion domains. No binding was detected in the absence of aBeta antibodies.

[0846] FIGS. 44A- FIG. 44D show the potency of anti-CD20 antibodies (rituximab, ublituximab, obinutuzumab, ofatumumab, and ocrelizumab) fused to brain shuttle VHH domains. Multiple VHH domains (TfR-1409, TfR-1409-51, CD98-3, and CD98-126) as well as Fc enhancing mutations (S239D/1332E) were evaluated with ocrelizumab, while just TfR-1409-51 and WT Fc was evaluated with the other anti-CD20 antibodies. The shift in ocrelizumab fusion ADCC EC50 relative to WT ocrelizumab ADCC ranged from 2.5-fold to 8.7-fold depending on the evaluated VHH domain. Fc enhancement did not significantly impact the activity of ocrelizumab. Of the anti-CD20 antibodies evaluated with TfR-1409-51, rituximab-TfR-1409-51 demonstrated a significant increase in luminescence signal relative to WT rituximab, the ADCC EC50 of ublituximab-TfR-1409-51 shifted 6.6-fold relative to WT ublituximab, the ADCC EC50 of obinutuzumab-TfR-1409-51 shifted 1.6-fold relative to WT obinutuzumab, and the ADCC EC50 of ofatumumab-TfR-1409-51 shifted 10.4-fold relative to WT ofatumumab. In all cases, the parental antibody remained functional following fusion to VHH domains.

### Example 35: Multiplexed In Vivo Screening and Assessment of Phenotypes of TfR Shuttles and Shuttle-IgG Lecanemab Fusions in Cynomolgus Monkeys

[0847] The present example demonstrates a multiplexed, high-throughput method of screening shuttles (e.g., shuttle agents or shuttle moieties (e.g., TfR shuttles)) and shuttle-IgG fusions (e.g., shuttle-cargo polypeptides) as described herein. The present example also demonstrates that a binder-barcode platform described herein can be used to assess inducible expression of a delivered cargo polypeptide in monkeys. Moreover, the present example demonstrates that a binder-barcode platform described herein can be used to identify and/or quantify cargo polypeptides and/or shuttle-cargo polypeptides and/or shuttles and/or components thereof for certain phenotypes such as expression and/or localization. For example, in some embodiments, shuttles (e.g., shuttle moieties) can be identified and/or assessed for ability to cross the blood-brain barrier (BBB) (e.g., by binding to a BBB surface receptor and inducing transcytosis into the brain) as described by this example. For example, shuttle-IgG fusions can be identified and/or assessed for brain enrichment. Shuttle-IgG fusions can be selected based on increased concentration in brain cell(s) relative to other cell(s) (e.g., serum). In some embodiments, a shuttle is or comprises a shuttle moiety.

[0848] Other types of cargo components can be assessed using a binder-barcode platform as described herein. Phenotypes other than expression and localization can also be quantified and/or assessed using a binder-barcode platform as described herein. Exemplary phenotypes include epitope properties, affinity, thermostability, pH sensitivity, or other phenotypes described herein.

### Method

### Molecule Construction and Production:

[0849] Heavy and light chain plasmid DNA was combined at a 1:1.5 ratio for symmetrical antibodies or 1:1:3 heavy (knob):heavy (hole):light chain plasmid to a total mass of 40 μg combined with 10 μg salmon sperm DNA. DNA was complexed with Expifectamine293 according to manufacturer recommendations (Gibco) in a transfection volume of 50 mL. Transfected cells were harvested by centrifugation on day 5. 1 mL cell culture supernatant was transferred to a fresh 96-deep well plate containing 10 μL MagSepharose PrismA beads (Cytiva) in three replicates. Supernatants and beads were incubated at 36.5° C. for 1 hour at 1,000 RPM. Beads were collected, washed, and purified antibodies eluted into 120 μL 100 mM glycine, 150 mM sodium chloride, pH 3.2 using the KingFisher Purification System (Thermo Fisher) and neutralized with 15 μL 1 M Sodium Phosphate, pH 7. Purified antibodies were quantified by BCA and evaluated for aggregation by size exclusion chromatography. Antibodies of sufficient quality were combined equimolar by dosing group for pooled purification. Purification was performed on an Akta Pure25 with a HitTrap MabSelect PrismA column at 5 mL/min. Pooled cell culture supernatant was loaded onto the column washed with 20 mM sodium phosphate, 150 mM sodium chloride, 1 pH 7.0 and eluted with 100 mM glycine, 150 mM sodium chloride, pH 3.2 directly into 10% volume of 1M sodium phosphate, pH 7.0. Peak fractions were pooled and dialyzed for 20 hours against 2×4 L of 20 mM sodium phosphate, 150 mM sodium chloride. Dialyzed antibodies were diluted to a final concentration of ˜0.5 mg/mL/antibody to dose at 5 mg/kg/antibody (IgG equivalent). Antibody pools were snap frozen in liquid nitrogen and thawed before dosing.

### In Vivo Pharmacokinetic Multiplex Study in Ported Cynomolgus Monkeys:

[0850] In vivo multiplexing studies in non-human primates (NHP) provided an opportunity to characterize pharmacokinetics (PK), biodistribution, and other properties of shuttles and shuttle-cargo polypeptides. Moreover, in vivo multiplexing were used to perform head-to-head comparisons of shuttles and shuttle-cargo polypeptides within individual animals.

[0851] In an initial experiment, antibodies were pooled into a test article of 9 and were injected at around 1.6 mg/kg/antibody for a total dose of 14.4 mg/kg. A total of 2 non-naive cynomolgus monkeys receive a single intravenous (IV) infusion over 30 minutes of test material on Day 0 followed by 0.5 mL of saline to flush the dose from the IV catheter. The end time of dose administration was used to determine target times for blood and Cerebrospinal fluid (CSF) sample collection time points. Blood samples, processed to obtain serum and plasma, and CSF samples were collected at various time points; Days −5, −3, 1, 2, 3, 5, 7, 10, 14, and 21.

[0852] In a second experiment, 37 shuttles—each with a unique barcode—were individually expressed and purified, pooled into a single test article, and examined in NHP across multiple tissues and timepoints using compositions and methods described herein.

### Results

[0853] FIG. 46 shows CSF PK for several shuttle variants and shuttle-IgG fusions (e.g., shuttle-cargo polypeptides as described herein) tested in Cynomolgus monkeys. As observed from the plots, monovalent TfR-1409-51 and bivalent TfR-891 were both compatible with the Denali control molecule. Shuttle-cargo fusion Lecanemab-TfR-734, which was previously shown to have poor brain uptake in mouse showed similar low uptake in NHP. Lecanemab by itself has poor visibility and is only seen from 1-5 days but is below limit of detection for the rest of the study.

[0854] FIG. 69 shows plots of pharmacokinetic (PK) profiles of selected TfR shuttles (blue) vs two unshuttled controls (gray and black) across serum, brain tissue, and corresponding brain to serum ratio as measured in non-human primates (NHP). These data demonstrate that multiple exemplary TfR shuttles show brain enrichment vs unshuttled control in a multiplexed NHP study.

### Example 36: Characterization of TfR-1409-51 Shuttle and Shuttle-IgG Lecanemab Fusions

[0855] The present example demonstrates a method to characterize shuttles and shuttle-IgG fusions (e.g., shuttle-cargo polypeptides) as described herein. For example, the present examples demonstrates a method to characterize TfR-1409-51 shuttle and TfR-1409-51-Lecanemab fusion.

### Method

### Molecule Construction and Production:

[0856] Heavy and light chain plasmid DNA are combined at a 1:1.5 ratio for symmetrical antibodies or 1:1:3 heavy (knob):heavy (hole):light chain plasmid to a total mass of 40 μg which is combined with 10 μg salmon sperm DNA. DNA is complexed with Expifectamine293 according to manufacturer recommendations (Gibco) in a transfection volume of 50 mL. Transfected cells are harvested by centrifugation on day 5. 1 mL cell culture supernatant is transferred to a fresh 96-deep well plate containing 10 μL MagSepharose PrismA beads (Cytiva) in three replicates. Supernatants and beads are incubated at 36.5° C. for 1 hour at 1,000 RPM. Beads are collected, washed, and purified antibodies eluted into 120 μL 100 mM glycine, 150 mM sodium chloride, pH 3.2 using the KingFisher Purification System (Thermo Fisher) and neutralized with 15 μL 1 M Sodium Phosphate, pH 7. Purified antibodies are quantified by BCA and evaluated for aggregation by size exclusion chromatography. Antibodies of sufficient quality are combined equimolar by dosing group for pooled purification. Purification is performed on an Akta Pure25 with a HitTrap MabSelect SuRe pcc column at 5 mL/min. Pooled cell culture supernatant is loaded onto the column, washed with 20 mM sodium phosphate, 150 mM sodium chloride, 1 pH 7.0 and eluted with 100 mM glycine, 150 mM sodium chloride, pH 3.2 directly into 10% volume of 1M sodium phosphate, pH 7.0. Peak fractions are pooled, concentrated using centrifugal concentrators (10 kDa MWCO, MilliporeSigma). Concentrated antibodies are dialyzed into 20 mM sodium phosphate, 150 mM sodium chloride and diluted to a final concentration of ˜0.5 mg/mL/antibody to dose at 5 mg/kg/antibody (IgG equivalent). Antibody pools are snap frozen in liquid nitrogen and thawed before dosing.

### In Vivo Screening:

[0857] Mouse studies utilized hTfR females (Biocytongen). Mice are IV dosed via the tail vein with 5 mg/kg test article (singplex-one antibody). After 1, 6, 24 and 72 hours, animals are sacrificed, and blood (˜500 μL) is collected via cardiac puncture in serum separator tubes and spun at 14000 g for 10 min. Prior to organ collection mice are transcardially perfused with PBS. The brain is divided into two hemispheres and along with muscle, liver, heart and lungs, all tissues are snap frozen and stored at −80° C. Fresh-frozen brain tissue is homogenized using a Qiagen TissueLyser with 5 mm steel beads for 7 min at 30 Hz in 500 uL of RIPA lysis buffer+HALT protease inhibitors (100×) for 150 mg of brain tissue.

### Human IgG ELISA:

[0858] IgG antibody concentrations in mouse plasma and brain lysates are quantified using a generic human IgG ELISA (ab195215. AbCam) following the manufacturer's instructions. Plasma is diluted 1:10000, 1:20000, 1:40000 in a sample diluent provided with the ELISA kit. Similarly, brain lysates are diluted 1:5, 1:10 and 1:20 for analysis of huIgG concentration. Briefly, samples and standard curves are incubated with an antibody cocktail for 40 minutes at room temperature on a plate shaker set to 400 rpm. After washes, a TMB Development Solution is added to each well and the reaction is stopped with the addition of a Stop Solution to each well. Absorbance is measured at 450 nm in a plate reader. The standard curve is fit using a linear logistic regression.

### Example 37: In Vivo Detection of Shuttle-Antibody Payload Fusions

[0859] The present example demonstrates in vivo characterization of shuttle-payload fusions as described herein. Specifically, the present example demonstrates immunofluorescence detection of a TfR-1409-51-anti-Aβ mAb construct in specific brain regions. In addition, specifically, the present example demonstrates immunofluorescence detection of a FLT1-49 anti-Aβ mAb construct in both specific brain regions and whole brain images. Furthermore, the present example demonstrates that FLT1-49 increases the uptake and distribution of an anti-Abeta mAb payload throughout the mouse brain and shuttles an anti-Abeta mAb payload through the neurovasculature. Moreover, specifically, the present example demonstrates immunofluorescence detection of a CD98-11 anti-Aβ mAb construct in whole-brain images and shows that CD98-11 shuttle causes a fundamental shift in biodistribution of an anti-Abeta mAb.

### Method

### In Vivo Detection:

[0860] hTfR mice were IV dosed via the tail vein with 5 mg/kg of test articles. 24 hours after dosing, animals were perfused by PBS and brains were extracted, drop-fixed in 4% paraformaldehyde overnight at 4 C followed by 30% sucrose overnight at 4 C. Brains were then sectioned at 35 μm on a sliding cryostat, blocked in 5% NDS (Normal Donkey Serum), 10% of Triton in PBS for 1 hour at room temperature and stained with NeuN (Rabbit monoclonal anti-NeuN antibody (1:500, Abcam ab177487) overnight at 4 C in blocking buffer. After overnight incubation, sections were washed in PBS and and incubation with Alexa Fluor® 594 AffiniPure Donkey Anti-Rabbit IgG (H+L) (1:200)(Jackson 711-585-152) and Alexa Fluor®488 AffiniPure Donkey Anti-Human IgG (H+L) (1:200) Jackson 709-545-149) at room temperature for 2 hours.

[0861] Brain sections were washed in PBS then mounted on slides using Prolong Glass Antifade Mountant and imaged using a Zeiss Axioscan scope (20×/0.8 air objective).

[0862] ELISA was performed on samples obtained from mice using IgG Human SimpleStep ELISA® kit according to the protocol provided by the manufacturer.

### Immunohistochemical Staining:

[0863] Six-month-old 5×FAD mice (n=2 per group) were intravenously injected via tail with either an unshuttled anti-Aβ or FLT1-49-shuttled anti-Aβ at a dose of 50 mg/kg. Twenty-four hours post-injection, mice were perfused with cold PBS, and their brains were extracted and post-fixed in 4% paraformaldehyde solution overnight (24 hours). Following fixation, brains were dehydrated by immersion in 30% sucrose solution in PBS for at least 48 hours or until the brains had fully soaked in the solution. Brains were then frozen in OCT, and 30-μm-thick floating sections were obtained using a cryostat. These sections were stored in PBS with 2% sodium azide (NaN3) at 4° C.

[0864] For immunohistochemical staining, brain sections were washed three times for 10 minutes each with PBS+1% Triton X-100 to remove sodium azide (450 mL PBS+50 mL Triton X-100). Subsequently, sections were blocked in a solution containing 5% normal donkey serum (NDS), 10% Triton X-100 (1% final concentration), and 85% PBS for 1 hour at room temperature. The samples were then incubated overnight with shaking at 4° C. in blocking solution containing purified anti-β-Amyloid 1-16 antibody 6E10 (1 mg/mL; 1:1000 dilution). After washing with PBS, sections were incubated for 2 hours with secondary antibodies: Donkey anti-Mouse IgG (H+L) Highly Cross-Adsorbed Alexa Fluor™ 488 (1:200, Invitrogen) and Donkey anti-Human IgG (H+L) Highly Cross-Adsorbed Cy3 (1:200, Jackson Laboratory). Following a final wash with PBST three times for 10 minutes and once with PBS for 30 minutes, sections were mounted on slides using Prolong Gold DAPI Mounting Media.

[0865] Twenty-four hours after mounting, samples were imaged using a Zeiss AxioObserver 7 equipped with a 10× air objective, and images were captured using Zen software. Exposure settings were determined automatically by Zen software and applied consistently across all images. Exposure times were recorded for each experiment.

### Results

[0866] FIG. 51 shows micrographs of immunofluorescence imaging of an anti-aβ antibody alone versus MB-TfR-1409-51 and multiple benchmark shuttles. Each construct was assayed in humanized TfR mice at 5 mg/kg dose and imaged using constant exposure time at 4600 ms (Cy3). The micrographs show the in vivo biodistribution of constructs in mouse hippocampus sections stained for IgG at 6 and 24 hrs post-injection. The plot of FIG. 51 shows four of the shuttled and unshuttled antibodies shown in the micrographs, in an ELISA readout for total IgG concentration in the brain (nM) at 1, 6, 24, and 72 hours. MB-TfR-1409-51 is differentiated by faster and more total uptake in the brain relative to the Benchmark Shuttle B and unshuttled controls tested.

[0867] FIG. 57 shows micrographs of immunofluorescence imaging of an exemplary antibody alone versus shuttled antibody (IgG+FLT1-49). Each construct was assayed in C57 mice at 5 mg/kg. Shown here is distribution of IgG constructs in coronal brain sections and in the CA3 region of the hippocampus (20×) at 24 hours post-injection.

[0868] FIG. 58 depicts plots showing levels of an anti-Abeta mAb alone or fused to shuttle CD98-11. Levels were assessed in serum and whole brain by ELISA at 6, 24, 72, and 168 hr timepoints post-injection. Constructs were examined at 30 mg/kg in a humanized CD98 mouse. These data demonstrate that shuttle CD98-11 extends serum half-life and brain retention of an anti-Abeta mAb payload.

[0869] FIG. 59 depicts plots showing levels of an anti-Abeta mAb alone or fused to shuttle FLT1-49. Levels were assessed in serum and brain by ELISA at 6, 24, 72, and 168 hr timepoints post-injection. Constructs were examined at 30 mg/kg in C57 mice. These data demonstrate that shuttle FLT1-49 improves uptake of an anti-Abeta mAb payload.

[0870] FIG. 60 depicts plots showing levels of an anti-Abeta mAb alone or fused to shuttle FLT1-49. Levels were assessed in serum and brain by ELISA at 6, 24, 72, and 168 hr timepoints post-injection. Constructs were examined at 30 mg/kg in C57 mice. These data demonstrate that shuttle FLT1-49 improves uptake of an anti-Abeta mAb payload.

[0871] FIG. 61 shows representative 3D whole brain images generated using light sheet fluorescence microscopy (LSFM) and whole-organ immunohistochemistry (iDISCO) following treatment with an anti-Abeta mAb alone (unshuttled), versus fused to shuttle CD98-11, or a TfR-shuttled Abeta control. Constructs were examined at 50 mg/kg in humanized CD98 or humanized TfR mice at 24 hr post-injection. These data demonstrate that shuttle CD98-11 causes a fundamental shift in biodistribution of an anti-Abeta mAb.

[0872] FIG. 62 shows representative 3D whole brain images generated using light sheet fluorescence microscopy (LSFM) and whole-organ immunohistochemistry (iDISCO) following treatment with an anti-Abeta mAb alone (unshuttled), versus fused to shuttle FLT1-49, or a TfR-shuttled Abeta control. Constructs were examined at 50 mg/kg in C57 mice or humanized TfR mice at 24 hr post-injection. These data demonstrate that shuttle FLT1-49 increases uptake and distribution of an anti-Abeta mAb payload throughout the mouse brain.

[0873] FIG. 63 shows representative 2D sections from magnified areas of whole brains scans acquired using Light sheet fluorescence microscopy (LSFM). Immunostaining for CD31 and hIgG are displayed in the same brain in teal and glow, respectively. Scale bars are 200 μm. Constructs were examined at 50 mg/kg in C57 mice or humanized TfR mice at 24 hr post-injection. These data demonstrate that FLT1-49 shuttles an anti-Abeta mAb payload through neurovasculature.

[0874] FIG. 68 shows representative immunofluorescence images from brain sections twenty-four hours post-injection of either unshuttled anti-Aβ or FLT1-49 shuttled anti-Aβ. Six-month-old 5×FAD mice (n=2 per group) were intravenously injected via tail with constructs at a dose of 50 mg/kg. Abeta plaques are displayed in green and antibodies are displayed in red.

### Example 38: In Vitro RNA Targeting Using a Shuttle-Conjugated ASO

[0875] The present example demonstrates in vitro RNA targeting via a shuttle-conjugated ASO as described herein. Specifically, the present example demonstrates MALAT1 knockdown in TfR-expressing cells in response to TfR-1409-51-conjugated MALAT1 ASO.

### Method

### Antisense Oligonucleotide Sequence:

[0876] Antisense oligonucleotide (ASO) targeting a long-noncoding RNA (lncRNA) MALAT1 was selected as an exemplary RNA target that can be used in accordance with embodiments of the present disclosure. An ASO targeting lncRNA MALAT1 was ordered from Integrated DNA Technologies (IDT). Sequences were comprised of nucleotides linked by phosphorothioate backbone chemistry and were capped at the 5′ and 3′ ends by phosphorothioate containing locked nucleic acids. Sequences also contained a 5′ azide modification linked by NHS ester chemistry as a handle for click chemistry mediated oligo conjugation (Click #2). Other click chemistry techniques can be used in accordance with embodiments of the present disclosure.

Exemplary ASO Sequence 1 that Targets MALAT1

(SEQ ID NO: 9061)
/5AzideN/+G*+G*+C*+A*+T*A*T*G*C*A*G*A*T*A*A*+T*+
G*+T*+T*+C
“/5 AzideN/”-5' azide modification linked
through NHS chemistry
“+”-Locked nucleic acid chemistry
“*”-Phosphorothioate linkage

### Protein Constructs:

[0877] To generate Fc-containing constructs with a single ASO attachment site, and to generate constructs containing only a single shuttle moiety, a Knob/Hole strategy was employed. For ASO conjugation, a carboxy-terminal sequence containing a GGGGS linker (SEQ ID NO: 9060), sortase A site and hexahistadine tag (SEQ ID NO: 9064) (GGGGGSLPETGGHHHHHH (SEQ ID NO: 9062)) was employed into a “knob” construct. TfR1409-51 was additionally appended to the amino-terminus of this “knob” construct. Control molecule constructs were designed similarly, for an unshuttled control construct a “knob” side is as described, but without TfR1409-51 at the amino-terminus. Benchmark #1 is constructed with a shuttling moiety within a Fc region as described herein.

### Protein Expression and Purification:

[0878] Plasmid DNA for knob and hole constructs was combined at a 1:1 ratio for transfection into Expi293F cells (Thermo Fisher), using 1 μg total plasmid mass per mL of transfection. DNA was sterile filtered and complexed with Expifectamine293, 1 L transfection volumes were used for each construct. Transfected cells were harvested by centrifugation four days after transfection. For each construct, supernatant was collected and sterile filtered using 0.2 μm filters before application on a 5 mL HiTrap MabSelect PrismA columns (Cytiva). Unbound material was washed from the column using 200 mL of 1×PBS before elution with 30 mL of elution buffer (100 mM glycine pH 3.2; 150 mM NaCl). Eluted protein was brought to neutral pH by addition of 3.5 mL 1M NaPO4 pH 7.0. Purified protein was concentrated to 300-400 μM using 10 kDa MWCO Amicon centrifugal filters (Millipore). Concentrated proteins were supplemented with glycerol to a final concentration of 20% before snap freezing in liquid nitrogen and storage at −80° C.

### Sortase Mediated Conjugation of “Click #1” to Protein Constructs:

[0879] Purified proteins were desalted into Click #1 conjugation buffer (30 mM HEPES pH 7.0; 250 mM NaCl) using PD-10 desalting columns (Cytiva). Click #1 sortase mediated conjugation reactions contained 50 μM desalted Fc construct; 50 mM HEPES pH 7.0; 10 mM CaCl2; 5 μM sortase A enzyme; 700 μM DBCO-PEG4-Gly-Gly-Gly (Vector Labs). Reactions were incubated at room temperature for 4 hours. Reactions were then supplemented with 2M imidazole pH 7.0 and 5M NaCl to final concentrations of 15 mM imidazole; 750 mM NaCl before addition of Ni Sepharose HP resin (Cytiva) to remove unreacted Fc constructs and sortase. Nickel resin was incubated with completed Click #1 reactions for 15 minutes, resin removed by centrifugation and the supernatant containing completed reactions was collected and filtered using 0.2 μm syringe filters. To remove excess PEG4-Gly-Gly-Gly, constructs were desalted into 20 mM NaPO4 pH 7.0; 150 mM NaCl.

### Click #2 ASO Conjugation and Size Exclusion Purification:

[0880] Desalted Click #1 reactions were combined with azide-containing Exemplary ASO 1 at final concentrations of 100 μM Click #1 reactions, 150 μM Exemplary ASO 1. Samples incubated at room temperature for 18 hours. DNA conjugation efficacy was assessed by running samples on 4-12% gradient SDS-PAGE gels, which were then stained with 1:10,000 sybrGold DNA stain reagent (Thermo Fisher) and imaged. Same gels were then stained with Coomassie and imaged. DNA conjugated proteins were then further purified by size exclusion chromatography using a superdex200 column (Cytiva) to remove excess ASO. Final purified product was then concentrated, and flash frozen at −80° C.

### MALAT1 Knockdown:

[0881] 96-well nunclon delta treated plates (Thermo Fisher) were coated with poly-D lysine (Gibco) according to manufacture instructions. Wells were seeded with 20,000 cells/well using HEK293 cells overexpressing TfR Seeded cells were allowed to attach overnight and the next day media was aspirated and replaced with media containing 0-500 nM ASO conjugated constructs or ASO alone. Treated cells were then incubated for 72 hours before harvest and RNA extraction. RNA extraction was conducted using the RNeasy-96 kit (Qiagen) according to manufacture instructions. 2 μL of extracted RNA (5-10 ng/uL) was used for the qRT-PCR assay using the QuantiNova Probe RT-PCR kit (Qiagen). FAM-labeled TaqMan probes (Thermo Fisher) for human MALAT1 and human GAPDH were used in separate reactions. MALAT1 fold-change was calculated using the ΔΔCt method using GAPDH as a reference gene and normalized to untreated cells.

### Results

[0882] FIG. 53A illustrates an exemplary two-step conjugation strategy for ASO attachment described herein. FIG. 53B shows that ASO conjugation efficiency for each construct exceeded 90% as visualized by Coomassie staining of SDS-PAGE gels. DNA staining demonstrated that Coomassie-shifted bands are indeed conjugated to ASO. Size exclusion chromatography showed that excess ASO can be separated from ASO conjugated protein products (see FIG. 53B). FIG. 54 shows knockdown of MALAT1 in HEK293 cells overexpressing TfR as measured by qRT-PCR. Error bars illustrate standard deviation across three separate experiments. ASOs conjugated to Fc molecules containing TfR shuttles (TfR1409-51 and Benchmark #1) reduced the expression of their ASO target (MALAT1) to a greater degree than an unshuttled control.

[0883] Other types of RNAi strategies can be used in accordance with embodiments described by this Example.

### REFERENCES

[0884] Towbin H, Staehelin T, Gordon J. Electrophoretic transfer of proteins from polyacrylamide gels to nitrocellulose sheets: procedure and some applications. Proc Natl Acad Sci USA. 1979; 76(9):4350-4354. Doi:10.1073/pnas.76.9.4350
[0885] Engvall E, Perlmann P. Enzyme-linked immunosorbent assay, Elisa. 3. Quantitation of specific antibodies by enzyme-labeled anti-immunoglobulin in antigen-coated tubes. J Immunol. 1972 July; 109(1):129-35. PMID: 4113792.
[0886] Elshal M F, McCoy J P Multiplex bead array assays: performance evaluation and comparison of sensitivity to ELISA. Methods. 2006 April; 38(4):317-23. Doi: 10.1016/j.ymeth.2005.11.010. PMID: 16481199; PMCID: PMC1534009.
[0887] Shendure J, Porreca G J, Reppas N B, Lin X, McCutcheon J P, Rosenbaum A M, Wang M D, Zhang K, Mitra R D, Church G M. Accurate multiplex polony sequencing of an evolved bacterial genome. Science. 2005 Sep. 9; 309(5741):1728-32. Doi: 10.1126/science.1117389. Epub 2005 Aug. 4. PMID: 16081699.
[0888] Trads J B, Tørring T, Gothelf K V. Site-Selective Conjugation of Native Proteins with DNA. Acc Chem Res. 2017 Jun. 20; 50(6):1367-1374. Doi: 10.1021/acs.accounts.6b00618. Epub 2017 May 9. PMID: 28485577.
[0889] Egloff P, Zimmermann I, Arnold F M, Hutter C A J, Morger D, Opitz L, Poveda L, Keserue H A, Panse C, Roschitzki B, Seeger M A. Engineered peptide barcodes for in-depth analyses of binding protein libraries. Nat Methods. 2019 May; 16(5):421-428. Doi: 10.1038/s41592-019-0389-8. Epub 2019 Apr. 22. PMID: 31011184; PMCID: PMC7116144.
[0890] Pollock S B, Hu A, Mou Y, Martinko A J, Julien O, Hornsby M, Ploder L, Adams J J, Geng H, Müschen M, Sidhu S S, Moffat J, Wells J A. Highly multiplexed and quantitative cell-surface protein profiling using genetically barcoded antibodies. Proc Natl Acad Sci USA. 2018 Mar. 13; 115(11):2836-2841. Doi: 10.1073/pnas.1721899115. Epub 2018 Feb. 23. PMID: 29476010; PMCID: PMC5856557.
[0891] Mohan D, Wansley D L, Sie B M, Noon M S, Baer A N, Laserson U, Larman H B. PhIP-Seq characterization of serum antibodies using oligonucleotide-encoded peptidomes. Nat Protoc. 2018 September; 13(9):1958-1978. Doi: 10.1038/s41596-018-0025-6. Erratum in: Nat Protoc. 2018 Oct. 25; PMID: 30190553; PMCID: PMC6568263.
[0892] Barbas, C. F., Burton, D. R., Scott, J. K., & Silverman, G. J. Phage Display: A Laboratory Manual. 2001. Cold Spring Harbor Laboratory Press.
[0893] Yu Y. J, Zhang Y, Kenrick M., Hoyte K., Luk W., Lu Y., et al. Boosting brain uptake of a therapeutic antibody by reducing its affinity for a transcytosis target. Sci Transl Med 3, 84ra44 (2011).
[0894] P. Emami et al. Plug & play directed evolution of proteins with gradient-based discrete MCMC. Mach. Learn.: Sci. Technol. 4 025014 (2023).
[0895] B. L. Hie et al. Efficient evolution of human antibodies from general protein language models. Nat Biotechnol 42, 275-283 (2023).
[0896] Z. Lin et al. Language models of protein sequences at the scale of evolution enable accurate structure prediction. bioRxiv (2022).
[0897] A. Elnaggar et al. ProtTrans: Toward Understanding the Language of Life Through Self-Supervised Learning. IEEE Transactions on Pattern Analysis and Machine Intelligence, 44.10, 7112-7127 (2022).
[0898] T. H. Olsen et al. Observed Antibody Space: A diverse database of cleaned, annotated, and translated unpaired and paired antibody sequences. Protein Sci. 31.1, 141-146 (2022)

### Other Embodiments

[0899] It is to be appreciated by those skilled in the art that various alterations, modifications, and improvements to the present disclosure will readily occur to those skilled in the art. Such alterations, modifications, and improvements are intended to be part of the present disclosure, and are intended to be within the spirit and scope of the invention. Accordingly, the foregoing description and drawing are by way of example only and any invention described in the present disclosure if further described in detail by the claims that follow.

[0900] Those skilled in the art will appreciate typical standards of deviation or error attributable to values obtained in assays or other processes as described herein. The publications, websites and other reference materials referenced herein to describe the background of the invention and to provide additional detail regarding its practice, including those listed in the above References section, are hereby incorporated by reference in their entireties.

[0901] It is to be understood that while embodiments of the invention have been described in conjunction with the detailed description thereof, the foregoing description is intended to illustrate and not limit the scope of the invention, which is defined by the scope of the appended claims. Other aspects, advantages, and modifications are within the scope of the following claims.

### EQUIVALENTS

[0902] Those skilled in the art will recognize, or be able to ascertain using no more than routine experimentation, many equivalents to the specific embodiments of the invention described herein. The scope of the present invention is not intended to be limited to the above Description, but rather is as set forth in the following claims:

Lengthy table referenced here
US20260158147A1-20260611-T00004
Please refer to the end of the specification for access instructions.

Lengthy table referenced here
US20260158147A1-20260611-T00005
Please refer to the end of the specification for access instructions.

LENGTHY TABLES
The patent application contains a lengthy table section. A copy of the table is available in electronic form from the USPTO web site (https://seqdata.uspto.gov/docdetail?docId=US20260158147A1). An electronic copy of the table will also be available from the USPTO upon request and payment of the fee set forth in 37 CFR 1.19(b)(3).

1. A peptide shuttle, wherein the peptide shuttle has or comprises an amino acid sequence having at least 80%, at least 85%, at least 90%, at least 91%, at least 92%, at least 93%, at least 94%, at least 95%, at least 96%, at least 97%, at least 98%, at least 99%, or 100% identity to any one of SEQ ID NOs: 8813-8894.

2. The peptide shuttle of claim 1, wherein the peptide shuttle has or comprises an amino acid sequence according to any one of SEQ ID NOs: 8813-8894.

3. The peptide shuttle of claim 1, wherein the peptide shuttle has or comprises an amino acid sequence according to SEQ ID NO: 8873.

4. The peptide shuttle of claim 1, wherein the peptide shuttle has or comprises an amino acid sequence according to any one of SEQ ID NOs: 8891-8894.

5. The peptide shuttle of claim 1, wherein the peptide shuttle has a length of 20 to 200 amino acids.

6.-10. (canceled)

11. A shuttle component, wherein the shuttle component has or comprises a nucleic acid sequence having at least 80%, at least 85%, at least 90%, at least 91%, at least 92%, at least 93%, at least 94%, at least 95%, at least 96%, at least 97%, at least 98%, At least 99%, or 100% identity to any one of SEQ ID NOs: 8753-8812.

12.-20. (canceled)

21. A polypeptide comprising:
(a) a peptide shuttle; and
(b) a cargo polypeptide,
wherein the peptide shuttle is operably linked to the cargo polypeptide.

22.-25. (canceled)

26. The polypeptide of claim 21, wherein the peptide shuttle has or comprises an amino acid sequence having at least 80%, a leas 85%, at least 90%, at least 91%, at least 92%, at least 93%, at least 94%, at least 95%, at least 96%, at least 97%, at least 98%, at least 99%, or 100% identity to any one of SEQ ID NOs: 8813-8894.

27. The polypeptide of claim 21, wherein the peptide shuttle has or comprises an amino acid sequence according to SEQ ID NO: 8873.

28. The polypeptide of claim 21, wherein the peptide shuttle has or comprises a nucleic acid sequence according to any one of SEQ ID NOs: 8891-8894.

29. (canceled)

30. The polypeptide of claim 21, wherein the peptide shuttle has a length of 20 to 200 amino acids.

31.-35. (canceled)

36. The polypeptide of claim 21, wherein the cargo polypeptide is or comprises a therapeutic polypeptide.

37.-59. (canceled)

60. A polynucleotide comprising:
(a) a shuttle component whose nucleotide sequence is or comprises a sequence encoding a peptide shuttle; and
(b) a cargo component whose nucleotide sequence is or comprises a sequence encoding a cargo polypeptide.

61.-116. (canceled)

117. A composition comprising:
(a) a shuttle; and
(b) a cargo (e.g., a cargo polypeptide, e.g., a cargo nucleotide (e.g., a cargo DNA, e.g., a cargo RNA, e.g., a cargo DNA/RNA)),
wherein the shuttle is operably linked to the cargo.

118. The composition of claim 117, wherein the shuttle is a peptide shuttle.

119. (canceled)

120. The composition of claim 118, wherein the peptide shuttle has or comprises an amino acid sequence having at least 80%, a leas 85%, at least 90%, at least 91%, at least 92%, at least 93%, at least 94%, at least 95%, at least 96%, at least 97%, at least 98%, at least 99%, or 100% identity to any one of SEQ ID NOs: 8813-8894.

121. The composition of claim 118, wherein the peptide shuttle has or comprises an amino acid sequence according to SEQ ID NO: 8873.

122. The composition of claim 118, wherein the peptide shuttle has or comprises an amino acid sequence according to any one of SEQ ID NOs: 8891-8894.

123.-124. (canceled)

125. The composition of claim 117, wherein the cargo is a therapeutic agent.

126. (canceled)

127. The composition of claim 117, wherein the cargo is or comprises an antibody or a fragment thereof or a variant thereof.

128.-130. (canceled)

131. The composition of claim 127, wherein the fragment has or comprises a sequence having at least 80%, at least 85%, at least 90%, at least 91%, at least 92%, at least 93%, at least 94%, at least 95%, at least 96%, at least 97%, at least 98%, at least 99%, or 100% identity to any one more sequences (e.g., VL, VH, CDR sequences) associated with rituximab, ocrelizumab, ofatumumab, ublituximab, binutuzumab, aducanumab, lecanemab, gantenerumab, donanemab, prasinezumab, anti-BACE-1 antibody 6266, anti-BACE-1 antibody YW412.8.31, Lu AF82422, or MEDI1341.

132.-137. (canceled)

138. The composition of claim 118, wherein the peptide shuttle has a length of 20 to 200 amino acids.

139.-166. (canceled)

167. A cell comprising the peptide shuttle of claim 1, the shuttle component of claim 11, the polypeptide of claim 21, the polynucleotide of claim 60, the composition of claim 117; or population thereof.

168. (canceled)

169. A pharmaceutical composition comprising peptide shuttle of claim 1, the shuttle component of claim 11, the polypeptide of claim 21, the polynucleotide of claim 60, the composition of claim 117, or any combination thereof.

170. A kit comprising a set of peptide shuttles, wherein each peptide shuttle of the set is according to claim 1.

171.-193. (canceled)

194. A method for identifying a therapeutic polypeptide or a target polypeptide to treat a disease, disorder, or condition comprising steps of:
(a) subjecting a population of barcoded shuttle-cargo polypeptides to an assessment, wherein each barcoded shuttle-cargo polypeptide comprises:
(i) a peptide shuttle,
(ii) a peptide barcode, and
(iii) a cargo polypeptide
wherein the peptide shuttle is operably linked to the cargo polypeptide, and the cargo polypeptide is operably linked to the peptide barcode;
(b) separating those members of the population that satisfy the assessment from those that do not, so that a positive population or a negative population, or both, is identified;
(c) contacting the positive population, or the negative population, or each population separately from the other, with a set of binders which includes at least one binder specific for each barcode in the population; and
(d) determining which binders bind to the separated members, thereby determining which barcoded shuttle-cargo polypeptides are present in the contacted population(s).

195.-270. (canceled)

271. A method of delivering a cargo to a tissue (e.g., the brain) comprising:
administering the cargo, or characteristic portion thereof, wherein the cargo is associated (e.g., covalently, e.g., non-covalently) with a peptide shuttle of claim 1.

272. (canceled)

273. The method of claim 271, wherein the method is a method of treatment.

274. The method of claim 271, wherein the therapeutic polypeptide comprises a peptide shuttle.

275. The method of claim 271, wherein the peptide shuttle is at a higher concentration in a brain cell, or population thereof, relative to a control cell or population thereof (e.g., serum).

276. The method of claim 271, wherein the tissue is or comprises a brain tissue.

277. The method of claim 271, wherein the method comprises treating a disease, disorder, or condition, wherein the disease, disorder, or condition is brain cancer (e.g., glioblastoma, metastatic brain cancers), Alzheimer's Disease (AD), Parkinson's Disease (PD), Huntington's Disease (HD), Multiple Sclerosis (MS), Bell's palsy, Cerebral palsy, Progressive Supranuclear Palsy (PSP), epilepsy, Motor Neuron Disease (MND), Amyotrophic Lateral Sclerosis (ALS), spinal muscular atrophy, Multiple System Atrophy (MSA), ataxia (e.g., spinocerebellar, Friedreich), Frontotemporal Dementia (FTD), or Lewy body disease.

The application's sequence listing, which the Patent Office published only in electronic form, follows.

SEQUENCE LISTING (9064 sequences)

SEQ ID NO: 1 - DNA, 753 bp, synthetic construct
  source 1..753: mol_type = other DNA
caggtgcagttagttgaaagcggcggtggtgtggtgcaaccgggtcgtagcttacgtttatcttgcgcggcctctggctttacctttagcagctatgcgatgcattgggtgcgtcaggcgccaggtaagggcttagagtgggtggcggttatctcttatgacggtagcaacaagtactacgccgatagcgttaaaggccgcttcacgattagccgcgacaacagcaaaaataccttatacttacagatgaattctttacgcgccgaggatacggccgtttattattgtgccgcggacccattagacgagtgggacgcctatctgttcgacgtgtggggtcagtggggccagggtacgttagtgaccgtgagctctggtggttcttctcgttcttctagcagcggcggtggcggctctggcggcggcggtgaaattgttctgacccagagcccggcgaccctgtctttaagcccaggtgaacgtgcgacgctgtcttgtcgcgcgtctcaatctgtgtctagctcttatttagcgtggtatcaacaaaaaccaggccaagccccgcgtctgttaatttacggtgccagctctcgcgccacgggcattccggcccgttttagcggtagcggcagcggtacggattttaccttaacgattagccgcttagagccggaggactttgccgtgtactattgcgaggcgtgggagtctgacacccgtattttcggtcaaggtaccaaggtggaaattaaa

SEQ ID NO: 2 - DNA, 729 bp, synthetic construct
  source 1..729: mol_type = other DNA
caggtgcagttagttgaaagcggcggtggtgtggtgcaaccgggtcgtagcttacgtttatcttgcgcggcctctggctttacctttagcagctatgcgatgcattgggtgcgtcaggcgccaggtaagggcttagagtgggtggcggttatctcttatgacggtagcaacaagtactacgccgatagcgttaaaggccgcttcacgattagccgcgacaacagcaaaaataccttatacttacagatgaattctttacgcgccgaggatacggccgtttattattgtgccgcgggttctacgtacgacgtttggggtcagtggggccaaggtaccttagtgaccgtgtcttctggtggcagcagccgttcttcttcttctggtggcggtggtagcggcggcggtggcgaaatcgtgctgacccaaagcccggccaccctgagcctgagcccgggcgaacgcgccaccttatcttgccgtgcgtctcagtctgtttctagctcttacttagcgtggtaccagcaaaaaccaggccaggccccacgtttactgatctacggcgcgagctctcgtgccacgggtattccagcccgcttcagcggcagcggtagcggcaccgactttaccctgacgatcagccgtctggagccagaagatttcgccgtttattactgtcaggtttgggataacaatgtggtttttggtcaaggtaccaaagtggagatcaaa

SEQ ID NO: 3 - DNA, 735 bp, synthetic construct
  source 1..735: mol_type = other DNA
caggtgcagttagttgaaagcggcggtggtgtggtgcaaccgggtcgtagcttacgtttatcttgcgcggcctctggctttacctttagcagctatgcgatgcattgggtgcgtcaggcgccaggtaagggcttagagtgggtggcggttatctcttatgacggtagcaacaagtactacgccgatagcgttaaaggccgcttcacgattagccgcgacaacagcaaaaataccttatacttacagatgaattctttacgcgccgaggatacggccgtttattattgtgccgcgggttctacgtacgacgtttggggtcagtggggccaaggtaccttagtgaccgtgtcttctggtggcagcagccgttcttcttcttctggtggcggtggtagcggcggcggtggcgaaatcgtgctgacccaaagcccggccaccctgagcctgagcccgggcgaacgcgccaccttatcttgccgtgcgtctcagtctgtttctagctcttacttagcgtggtaccagcaaaaaccaggccaggccccacgtttactgatctacggcgcgagctctcgtgccacgggtattccagcccgcttcagcggcagcggtagcggcaccgactttaccctgacgatcagccgtctggagccagaagatttcgccgtttattactgtcaggtttgggattctagcagcggtgtggttttcggtcagggcaccaaggttgagatcaaa

SEQ ID NO: 4 - DNA, 762 bp, synthetic construct
  source 1..762: mol_type = other DNA
caggtgcagttagttgaaagcggcggtggtgtggtgcaaccgggtcgtagcttacgtttatcttgcgcggcctctggctttacctttagcagctatgcgatgcattgggtgcgtcaggcgccaggtaagggcttagagtgggtggcggttatctcttatgacggtagcaacaagtactacgccgatagcgttaaaggccgcttcacgattagccgcgacaacagcaaaaataccttatacttacagatgaattctttacgcgccgaggatacggccgtttattattgtgccgcgcacggtggtacgaactctcgcggctggaaagccttagattactggggccagtggggccaaggtacgctggtgaccgtgtcttctggtggttctagccgctctagcagcagcggtggcggcggtagcggcggcggtggcgaaatcgtgctgacccagagcccggcgaccttatctctgtctccaggcgaacgtgccaccttatcttgtcgtgcctctcaaagcgttagctctagctacctggcgtggtaccaacagaagccgggtcaagcgccgcgtttactgatctacggtgcgtcttctcgcgccaccggcattccagcgcgtttttctggcagcggctctggtaccgattttacgttaaccatttctcgcttagaaccagaggatttcgcggtttattattgtcaggcctgggactctaccaccccgacggttgttttcggccaaggcaccaaagttgagatcaaa

SEQ ID NO: 5 - DNA, 747 bp, synthetic construct
  source 1..747: mol_type = other DNA
caggtgcagttagttgaaagcggcggtggtgtggtgcaaccgggtcgtagcttacgtttatcttgcgcggcctctggctttacctttagcagctatgcgatgcattgggtgcgtcaggcgccaggtaagggcttagagtgggtggcggttatctcttatgacggtagcaacaagtactacgccgatagcgttaaaggccgcttcacgattagccgcgacaacagcaaaaataccttatacttacagatgaattctttacgcgccgaggatacggccgtttattattgtgccggcgccggttcttctgccgcctctggctttgccacgtggggccaatggggccagggcacgttagttaccgtgagcagcggtggttcttctcgcagctcttctagcggcggcggtggcagcggtggcggcggcgagattgtgttaacccagagcccggcgaccctgagcttatctccgggtgagcgtgcgaccttaagctgtcgcgccagccaatctgttagctctagctacctggcctggtatcagcaaaagccgggtcaggccccacgtctgctgatctatggtgcctctagccgcgccacgggtattccggcgcgctttagcggctctggcagcggcacggactttaccctgacgatcagccgtttagagccagaagacttcgcggtttattactgccagacgtggggcgccgcctctggcgtgtttggtcaaggtacgaaagttgaaattaaa

SEQ ID NO: 6 - DNA, 744 bp, synthetic construct
  source 1..744: mol_type = other DNA
caggtgcagttagttgaaagcggcggtggtgtggtgcaaccgggtcgtagcttacgtttatcttgcgcggcctctggctttacctttagcagctatgcgatgcattgggtgcgtcaggcgccaggtaagggcttagagtgggtggcggttatctcttatgacggtagcaacaagtactacgccgatagcgttaaaggccgcttcacgattagccgcgacaacagcaaaaataccttatacttacagatgaattctttacgcgccgaggatacggccgtttattattgtgccaaagacgaggtttggatcgccgccttcgattattggggtcaatggggccaaggcaccctggttacggttagcagcggcggctcttctcgctcttctagctctggtggcggcggctctggcggcggtggcgaaattgttctgacccaaagcccggcgaccctgagcctgagcccaggtgaacgcgccaccctgagctgtcgtgcctctcaaagcgtttcttctagctacctggcctggtatcaacagaaaccaggtcaggccccgcgcttactgatttatggtgcgtcttctcgcgcgacgggtatcccagcgcgtttttctggcagcggctctggcaccgatttcacgctgaccatttctcgcctggaaccagaggactttgccgtttattactgccaaacctggggcacgggccacgttgtttttggccagggtacgaaggttgaaatcaaa

SEQ ID NO: 7 - DNA, 762 bp, synthetic construct
  source 1..762: mol_type = other DNA
caggtgcagttagttgaaagcggcggtggtgtggtgcaaccgggtcgtagcttacgtttatcttgcgcggcctctggctttacctttagcagctatgcgatgcattgggtgcgtcaggcgccaggtaagggcttagagtgggtggcggttatctcttatgacggtagcaacaagtactacgccgatagcgttaaaggccgcttcacgattagccgcgacaacagcaaaaataccttatacttacagatgaattctttacgcgccgaggatacggccgtttattattgtgccaaagaccgcggtggtgacgttgttaccgcgggtcgcggcttcgattattggggccaatggggtcaaggcaccctggtgacggtttcttctggtggctcttctcgtagcagctctagcggcggtggcggcagcggtggcggcggtgaaattgtgctgacccagagcccggccacgctgtctttaagcccgggcgagcgtgccacgttaagctgtcgcgccagccaaagcgttagctctagctatttagcctggtatcaacagaagccaggccaggcgccacgtttattaatctatggtgcctcttctcgtgcgaccggtattccggcgcgctttagcggctctggtagcggcaccgacttcaccctgacgatctctcgtttagagccggaggatttcgcggtgtactattgtcaacaatataataattggccaccaatcacgtttggtcagggcaccaaggttgagattaaa

SEQ ID NO: 8 - DNA, 744 bp, synthetic construct
  source 1..744: mol_type = other DNA
caggtgcagttagttgaaagcggcggtggtgtggtgcaaccgggtcgtagcttacgtttatcttgcgcggcctctggctttacctttagcagctatgcgatgcattgggtgcgtcaggcgccaggtaagggcttagagtgggtggcggttatctcttatgacggtagcaacaagtactacgccgatagcgttaaaggccgcttcacgattagccgcgacaacagcaaaaataccttatacttacagatgaattctttacgcgccgaggatacggccgtttattattgtgccaaaggtcgctgggacttcgactcttggggtcagtggggccaaggtaccttagtgaccgtgtcttctggtggcagcagccgttcttcttcttctggtggcggtggtagcggcggcggtggcgaaatcgtgctgacccaaagcccggccaccctgagcctgagcccgggcgaacgcgccaccttatcttgccgtgcgtctcagtctgtttctagctcttacttagcgtggtaccagcaaaaaccaggccaggccccacgtttactgatctacggcgcgagctctcgtgccacgggtattccagcccgcttcagcggcagcggtagcggcaccgactttaccctgacgatcagccgtctggagccagaagatttcgccgtttattactgtcaggtttgggattctagcagcgacaaaccatacgtttttggccagggtacgaaggttgaaatcaaa

SEQ ID NO: 9 - DNA, 756 bp, synthetic construct
  source 1..756: mol_type = other DNA
caggtgcagttagttgaaagcggcggtggtgtggtgcaaccgggtcgtagcttacgtttatcttgcgcggcctctggctttacctttagcagctatgcgatgcattgggtgcgtcaggcgccaggtaagggcttagagtgggtggcggttatctcttatgacggtagcaacaagtactacgccgatagcgttaaaggccgcttcacgattagccgcgacaacagcaaaaataccttatacttacagatgaattctttacgcgccgaggatacggccgtttattattgtgccaaaaacgacatcttagcctacggtagcgcgttcgactattggggtcagtggggccagggtacgttagtgaccgtgagctctggtggttcttctcgttcttctagcagcggcggtggcggctctggcggcggcggtgaaattgttctgacccagagcccggcgaccctgtctttaagcccaggtgaacgtgcgacgctgtcttgtcgcgcgtctcaatctgtgtctagctcttatttagcgtggtatcaacaaaaaccaggccaagccccgcgtctgttaatttacggtgccagctctcgcgccacgggcattccggcccgttttagcggtagcggcagcggtacggattttaccttaacgattagccgcttagagccggaggactttgccgtgtactattgccaagtgtgggactcttctagcgatcattgggttttcggtcaaggcacgaaagtggaaatcaaa

SEQ ID NO: 10 - DNA, 756 bp, synthetic construct
  source 1..756: mol_type = other DNA
caggtgcagttagttgaaagcggcggtggtgtggtgcaaccgggtcgtagcttacgtttatcttgcgcggcctctggctttacctttagcagctatgcgatgcattgggtgcgtcaggcgccaggtaagggcttagagtgggtggcggttatctcttatgacggtagcaacaagtactacgccgatagcgttaaaggccgcttcacgattagccgcgacaacagcaaaaataccttatacttacagatgaattctttacgcgccgaggatacggccgtttattattgtgccaaaaacgacatcttagcctacggtagcgcgtctgactattggggtcagtggggccagggtacgttagtgaccgtgagctctggtggttcttctcgttcttctagcagcggcggtggcggctctggcggcggcggtgaaattgttctgacccagagcccggcgaccctgtctttaagcccaggtgaacgtgcgacgctgtcttgtcgcgcgtctcaatctgtgtctagctcttatttagcgtggtatcaacaaaaaccaggccaagccccgcgtctgttaatttacggtgccagctctcgcgccacgggcattccggcccgttttagcggtagcggcagcggtacggattttaccttaacgattagccgcttagagccggaggactttgccgtgtactattgccaagtgtgggactcttctagcgatcattgggttttcggtcaaggcacgaaagtggaaatcaaa

SEQ ID NO: 11 - DNA, 756 bp, synthetic construct
  source 1..756: mol_type = other DNA
caggtgcagttagttgaaagcggcggtggtgtggtgcaaccgggtcgtagcttacgtttatcttgcgcggcctctggctttacctttagcagctatgcgatgcattgggtgcgtcaggcgccaggtaagggcttagagtgggtggcggttatctcttatgacggtagcaacaagtactacgccgatagcgttaaaggccgcttcacgattagccgcgacaacagcaaaaataccttatacttacagatgaattctttacgcgccgaggatacggccgtttattattgtgccaaaaacgacatcttaacgtacggtagcgcgttcgactattggggtcagtggggccagggtacgttagtgaccgtgagctctggtggttcttctcgttcttctagcagcggcggtggcggctctggcggcggcggtgaaattgttctgacccagagcccggcgaccctgtctttaagcccaggtgaacgtgcgacgctgtcttgtcgcgcgtctcaatctgtgtctagctcttatttagcgtggtatcaacaaaaaccaggccaagccccgcgtctgttaatttacggtgccagctctcgcgccacgggcattccggcccgttttagcggtagcggcagcggtacggattttaccttaacgattagccgcttagagccggaggactttgccgtgtactattgccaagtgtgggacggtggtagcgatcattgggttttcggtcaaggcacgaaagtggaaatcaaa

SEQ ID NO: 12 - DNA, 756 bp, synthetic construct
  source 1..756: mol_type = other DNA
caggtgcagttagttgaaagcggcggtggtgtggtgcaaccgggtcgtagcttacgtttatcttgcgcggcctctggctttacctttagcagctatgcgatgcattgggtgcgtcaggcgccaggtaagggcttagagtgggtggcggttatctcttatgacggtagcaacaagtactacgccgatagcgttaaaggccgcttcacgattagccgcgacaacagcaaaaataccttatacttacagatgaattctttacgcgccgaggatacggccgtttattattgtgccaaaaacgacatcttaacgtacggtagcgcgttcgactattggggtcagtggggccagggtacgttagtgaccgtgagctctggtggttcttctcgttcttctagcagcggcggtggcggctctggcggcggcggtgaaattgttctgacccagagcccggcgaccctgtctttaagcccaggtgaacgtgcgacgctgtcttgtcgcgcgtctcaatctgtgtctagctcttatttagcgtggtatcaacaaaaaccaggccaagccccgcgtctgttaatttacggtgccagctctcgcgccacgggcattccggcccgttttagcggtagcggcagcggtacggattttaccttaacgattagccgcttagagccggaggactttgccgtgtactattgccaagtgtgggacaacggtagcgatcattgggttttcggtcaaggcacgaaagtggaaatcaaa

SEQ ID NO: 13 - DNA, 756 bp, synthetic construct
  source 1..756: mol_type = other DNA
caggtgcagttagttgaaagcggcggtggtgtggtgcaaccgggtcgtagcttacgtttatcttgcgcggcctctggctttacctttagcagctatgcgatgcattgggtgcgtcaggcgccaggtaagggcttagagtgggtggcggttatctcttatgacggtagcaacaagtactacgccgatagcgttaaaggccgcttcacgattagccgcgacaacagcaaaaataccttatacttacagatgaattctttacgcgccgaggatacggccgtttattattgtgccaaaaacgacatcttaacgtacggtagcgcgttcgactattggggtcagtggggccagggtacgttagtgaccgtgagctctggtggttcttctcgttcttctagcagcggcggtggcggctctggcggcggcggtgaaattgttctgacccagagcccggcgaccctgtctttaagcccaggtgaacgtgcgacgctgtcttgtcgcgcgtctcaatctgtgtctagctcttatttagcgtggtatcaacaaaaaccaggccaagccccgcgtctgttaatttacggtgccagctctcgcgccacgggcattccggcccgttttagcggtagcggcagcggtacggattttaccttaacgattagccgcttagagccggaggactttgccgtgtactattgccaagtgtgggactctatcagcgatcattgggttttcggtcaaggcacgaaagtggaaatcaaa

SEQ ID NO: 14 - DNA, 756 bp, synthetic construct
  source 1..756: mol_type = other DNA
caggtgcagttagttgaaagcggcggtggtgtggtgcaaccgggtcgtagcttacgtttatcttgcgcggcctctggctttacctttagcagctatgcgatgcattgggtgcgtcaggcgccaggtaagggcttagagtgggtggcggttatctcttatgacggtagcaacaagtactacgccgatagcgttaaaggccgcttcacgattagccgcgacaacagcaaaaataccttatacttacagatgaattctttacgcgccgaggatacggccgtttattattgtgccaaaaacgacatcttaacgtacggtagcgcgttcgactattggggtcagtggggccagggtacgttagtgaccgtgagctctggtggttcttctcgttcttctagcagcggcggtggcggctctggcggcggcggtgaaattgttctgacccagagcccggcgaccctgtctttaagcccaggtgaacgtgcgacgctgtcttgtcgcgcgtctcaatctgtgtctagctcttatttagcgtggtatcaacaaaaaccaggccaagccccgcgtctgttaatttacggtgccagctctcgcgccacgggcattccggcccgttttagcggtagcggcagcggtacggattttaccttaacgattagccgcttagagccggaggactttgccgtgtactattgccaagtgtgggactcttctagcgatcattgggttttcggtcaaggcacgaaagtggaaatcaaa

SEQ ID NO: 15 - DNA, 756 bp, synthetic construct
  source 1..756: mol_type = other DNA
caggtgcagttagttgaaagcggcggtggtgtggtgcaaccgggtcgtagcttacgtttatcttgcgcggcctctggctttacctttagcagctatgcgatgcattgggtgcgtcaggcgccaggtaagggcttagagtgggtggcggttatctcttatgacggtagcaacaagtactacgccgatagcgttaaaggccgcttcacgattagccgcgacaacagcaaaaataccttatacttacagatgaattctttacgcgccgaggatacggccgtttattattgtgccaaaaacgacatcttaacgtacggtagcgcgttcgactattggggtcagtggggccagggtacgttagtgaccgtgagctctggtggttcttctcgttcttctagcagcggcggtggcggctctggcggcggcggtgaaattgttctgacccagagcccggcgaccctgtctttaagcccaggtgaacgtgcgacgctgtcttgtcgcgcgtctcaatctgtgtctagctcttatttagcgtggtatcaacaaaaaccaggccaagccccgcgtctgttaatttacggtgccagctctcgcgccacgggcattccggcccgttttagcggtagcggcagcggtacggattttaccttaacgattagccgcttagagccggaggactttgccgtgtactattgccaagtgtgggacacgaacaccgatcattggttattcggtcaaggcacgaaagtggaaatcaaa

SEQ ID NO: 16 - DNA, 741 bp, synthetic construct
  source 1..741: mol_type = other DNA
caggtgcagttagttgaaagcggcggtggtgtggtgcaaccgggtcgtagcttacgtttatcttgcgcggcctctggctttacctttagcagctatgcgatgcattgggtgcgtcaggcgccaggtaagggcttagagtgggtggcggttatctcttatgacggtagcaacaagtactacgccgatagcgttaaaggccgcttcacgattagccgcgacaacagcaaaaataccttatacttacagatgaattctttacgcgccgaggatacggccgtttattattgtgccaaaaaccgctactcttacggtgactattggggccaatggggtcagggtaccctggtgacggtttctagcggcggcagctctcgctcttcttctagcggtggtggcggcagcggtggcggcggtgaaattgtgttaacccagtctccggcgaccctgagcctgagcccgggtgagcgtgccacgctgagctgccgcgcgtctcaatctgtgtcttcttcttatttagcgtggtaccagcaaaaaccgggtcaagcgccacgtttattaatttatggcgccagctctcgcgccaccggtatcccagcccgttttagcggtagcggcagcggtaccgattttacgttaaccattagccgcttagaaccggaggacttcgcggtttactattgtgcggcctgggatgatttaagcggttgggttttcggccagggcacgaaggttgagattaaa

SEQ ID NO: 17 - DNA, 741 bp, synthetic construct
  source 1..741: mol_type = other DNA
caggtgcagttagttgaaagcggcggtggtgtggtgcaaccgggtcgtagcttacgtttatcttgcgcggcctctggctttacctttagcagctatgcgatgcattgggtgcgtcaggcgccaggtaagggcttagagtgggtggcggttatctcttatgacggtagcaacaagtactacgccgatagcgttaaaggccgcttcacgattagccgcgacaacagcaaaaataccttatacttacagatgaattctttacgcgccgaggatacggccgtttattattgtgccaatggtcgctcttctgcctacttcaatcattggggtcaatggggccaaggcaccctggttacggttagcagcggcggctcttctcgctcttctagctctggtggcggcggctctggcggcggtggcgaaattgttctgacccaaagcccggcgaccctgagcctgagcccaggtgaacgcgccaccctgagctgtcgtgcctctcaaagcgtttcttctagctacctggcctggtatcaacagaaaccaggtcaggccccgcgcttactgatttatggtgcgtcttctcgcgcgacgggtatcccagcgcgtttttctggcagcggctctggcaccgatttcacgctgaccatttctcgcctggaaccagaggactttgccgtttattactgccaacaggcgaacagcttcccatacacctttggccaaggtacgaaggtggagattaaa

SEQ ID NO: 18 - DNA, 741 bp, synthetic construct
  source 1..741: mol_type = other DNA
caggtgcagttagttgaaagcggcggtggtgtggtgcaaccgggtcgtagcttacgtttatcttgcgcggcctctggctttacctttagcagctatgcgatgcattgggtgcgtcaggcgccaggtaagggcttagagtgggtggcggttatctcttatgacggtagcaacaagtactacgccgatagcgttaaaggccgcttcacgattagccgcgacaacagcaaaaataccttatacttacagatgaattctttacgcgccgaggatacggccgtttattattgtgccccgaactctaactctccatcttactggggccagtggggtcaaggcacgctggtgaccgtttcttctggcggcagcagccgctcttcttcttctggcggtggtggcagcggcggtggcggcgagattgtgctgacgcagagcccagcgaccctgagcctgagcccgggcgagcgcgcgacgttaagctgccgtgccagccaatctgttagctcttcttacctggcctggtatcaacagaagccgggccaagccccgcgcctgttaatctatggcgcgtctagccgcgccacgggcatcccagcccgctttagcggctctggcagcggcacggattttaccttaacgattagccgtttagagccggaagacttcgccgtgtactactgccacatgtggaatgccagccgtaaccattgggttttcggtcagggcaccaaggttgagatcaaa

SEQ ID NO: 19 - DNA, 741 bp, synthetic construct
  source 1..741: mol_type = other DNA
caggtgcagttagttgaaagcggcggtggtgtggtgcaaccgggtcgtagcttacgtttatcttgcgcggcctctggctttacctttagcagctatgcgatgcattgggtgcgtcaggcgccaggtaagggcttagagtgggtggcggttatctcttatgacggtagcaacaagtactacgccgatagcgttaaaggccgcttcacgattagccgcgacaacagcaaaaataccttatacttacagatgaattctttacgcgccgaggatacggccgtttattattgtgccccgaactctaactctccatcttactggggccagtggggtcaaggcacgctggtgaccgtttcttctggcggcagcagccgctcttcttcttctggcggtggtggcagcggcggtggcggcgagattgtgctgacgcagagcccagcgaccctgagcctgagcccgggcgagcgcgcgacgttaagctgccgtgccagccaatctgttagctcttcttacctggcctggtatcaacagaagccgggccaagccccgcgcctgttaatctatggcgcgtctagccgcgccacgggcatcccagcccgctttagcggctctggcagcggcacggattttaccttaacgattagccgtttagagccggaagacttcgccgtgtactactgccacgtgtgggacagcagcggtgatcactgggttttcggccagggcacgaaggttgagattaaa

SEQ ID NO: 20 - DNA, 750 bp, synthetic construct
  source 1..750: mol_type = other DNA
caggtgcagttagttgaaagcggcggtggtgtggtgcaaccgggtcgtagcttacgtttatcttgcgcggcctctggctttacctttagcagctatgcgatgcattgggtgcgtcaggcgccaggtaagggcttagagtgggtggcggttatctcttatgacggtagcaacaagtactacgccgatagcgttaaaggccgcttcacgattagccgcgacaacagcaaaaataccttatacttacagatgaattctttacgcgccgaggatacggccgtttattattgtgcccgtgccaacgtttaccaacaaacgtgggcgtttgacccatggggccaatggggccagggcacgttagttaccgtgagcagcggtggttcttctcgcagctcttctagcggcggcggtggcagcggtggcggcggcgagattgtgttaacccagagcccggcgaccctgagcttatctccgggtgagcgtgcgaccttaagctgtcgcgccagccaatctgttagctctagctacctggcctggtatcagcaaaagccgggtcaggccccacgtctgctgatctatggtgcctctagccgcgccacgggtattccggcgcgctttagcggctctggcagcggcacggactttaccctgacgatcagccgtttagagccagaagacttcgcggtttattactgcatgcagggtgaacgctggccattagcgtttggccaaggtacgaaggtggagattaaa

SEQ ID NO: 21 - DNA, 741 bp, synthetic construct
  source 1..741: mol_type = other DNA
caggtgcagttagttgaaagcggcggtggtgtggtgcaaccgggtcgtagcttacgtttatcttgcgcggcctctggctttacctttagcagctatgcgatgcattgggtgcgtcaggcgccaggtaagggcttagagtgggtggcggttatctcttatgacggtagcaacaagtactacgccgatagcgttaaaggccgcttcacgattagccgcgacaacagcaaaaataccttatacttacagatgaattctttacgcgccgaggatacggccgtttattattgtgcccgtgcccgcggtgccaacacgtgggactattggggccaatggggtcagggtaccctggtgacggtttctagcggcggcagctctcgctcttcttctagcggtggtggcggcagcggtggcggcggtgaaattgtgttaacccagtctccggcgaccctgagcctgagcccgggtgagcgtgccacgctgagctgccgcgcgtctcaatctgtgtcttcttcttatttagcgtggtaccagcaaaaaccgggtcaagcgccacgtttattaatttatggcgccagctctcgcgccaccggtatcccagcccgttttagcggtagcggcagcggtaccgattttacgttaaccattagccgcttagaaccggaggacttcgcggtttactattgtcagcaagaatattcttttccagttacgtttggccagggtacgaaggttgaaatcaaa

SEQ ID NO: 22 - DNA, 744 bp, synthetic construct
  source 1..744: mol_type = other DNA
caggtgcagttagttgaaagcggcggtggtgtggtgcaaccgggtcgtagcttacgtttatcttgcgcggcctctggctttacctttagcagctatgcgatgcattgggtgcgtcaggcgccaggtaagggcttagagtgggtggcggttatctcttatgacggtagcaacaagtactacgccgatagcgttaaaggccgcttcacgattagccgcgacaacagcaaaaataccttatacttacagatgaattctttacgcgccgaggatacggccgtttattattgtgcccgtgacttccaccgcgcctacggtatggattattggggtcaatggggccaaggcaccctggttacggttagcagcggcggctcttctcgctcttctagctctggtggcggcggctctggcggcggtggcgaaattgttctgacccaaagcccggcgaccctgagcctgagcccaggtgaacgcgccaccctgagctgtcgtgcctctcaaagcgtttcttctagctacctggcctggtatcaacagaaaccaggtcaggccccgcgcttactgatttatggtgcgtcttctcgcgcgacgggtatcccagcgcgtttttctggcagcggctctggcaccgatttcacgctgaccatttctcgcctggaaccagaggactttgccgtttattactgccaacaggcgaacagcttcccaccaacctttggccaaggtacgaaggtggagattaaa

SEQ ID NO: 23 - DNA, 750 bp, synthetic construct
  source 1..750: mol_type = other DNA
caggtgcagttagttgaaagcggcggtggtgtggtgcaaccgggtcgtagcttacgtttatcttgcgcggcctctggctttacctttagcagctatgcgatgcattgggtgcgtcaggcgccaggtaagggcttagagtgggtggcggttatctcttatgacggtagcaacaagtactacgccgatagcgttaaaggccgcttcacgattagccgcgacaacagcaaaaataccttatacttacagatgaattctttacgcgccgaggatacggccgtttattattgtgcccgtgacggttctcgcgactacggtgcgggcttcgactattggggtcagtggggccagggtacgttagtgaccgtgagctctggtggttcttctcgttcttctagcagcggcggtggcggctctggcggcggcggtgaaattgttctgacccagagcccggcgaccctgtctttaagcccaggtgaacgtgcgacgctgtcttgtcgcgcgtctcaatctgtgtctagctcttatttagcgtggtatcaacaaaaaccaggccaagccccgcgtctgttaatttacggtgccagctctcgcgccacgggcattccggcccgttttagcggtagcggcagcggtacggattttaccttaacgattagccgcttagagccggaggactttgccgtgtactattgccaaacctggggtaacacgcatctggtgttcggtcaaggtaccaaggtggaaattaaa

SEQ ID NO: 24 - DNA, 741 bp, synthetic construct
  source 1..741: mol_type = other DNA
caggtgcagttagttgaaagcggcggtggtgtggtgcaaccgggtcgtagcttacgtttatcttgcgcggcctctggctttacctttagcagctatgcgatgcattgggtgcgtcaggcgccaggtaagggcttagagtgggtggcggttatctcttatgacggtagcaacaagtactacgccgatagcgttaaaggccgcttcacgattagccgcgacaacagcaaaaataccttatacttacagatgaattctttacgcgccgaggatacggccgtttattattgtgcccgtgacccacgcggtgacgccttcgatatttggggtcaatggggccaaggcaccctggttacggttagcagcggcggctcttctcgctcttctagctctggtggcggcggctctggcggcggtggcgaaattgttctgacccaaagcccggcgaccctgagcctgagcccaggtgaacgcgccaccctgagctgtcgtgcctctcaaagcgtttcttctagctacctggcctggtatcaacagaaaccaggtcaggccccgcgcttactgatttatggtgcgtcttctcgcgcgacgggtatcccagcgcgtttttctggcagcggctctggcaccgatttcacgctgaccatttctcgcctggaaccagaggactttgccgtttattactgccaacagtatcacaccacgccaccaacctttggccaaggtacgaaggtggagattaaa

SEQ ID NO: 25 - DNA, 747 bp, synthetic construct
  source 1..747: mol_type = other DNA
caggtgcagttagttgaaagcggcggtggtgtggtgcaaccgggtcgtagcttacgtttatcttgcgcggcctctggctttacctttagcagctatgcgatgcattgggtgcgtcaggcgccaggtaagggcttagagtgggtggcggttatctcttatgacggtagcaacaagtactacgccgatagcgttaaaggccgcttcacgattagccgcgacaacagcaaaaataccttatacttacagatgaattctttacgcgccgaggatacggccgtttattattgtgcccgtgaccgcggttactctggttacggcctgcgctactggggccaatggggccagggcacgttagttaccgtgagcagcggtggttcttctcgcagctcttctagcggcggcggtggcagcggtggcggcggcgagattgtgttaacccagagcccggcgaccctgagcttatctccgggtgagcgtgcgaccttaagctgtcgcgccagccaatctgttagctctagctacctggcctggtatcagcaaaagccgggtcaggccccacgtctgctgatctatggtgcctctagccgcgccacgggtattccggcgcgctttagcggctctggcagcggcacggactttaccctgacgatcagccgtttagagccagaagacttcgcggtttattactgccagtcttatgaccacaacagcgtggtgttcggtcaaggtaccaaggtggaaattaaa

SEQ ID NO: 26 - DNA, 744 bp, synthetic construct
  source 1..744: mol_type = other DNA
caggtgcagttagttgaaagcggcggtggtgtggtgcaaccgggtcgtagcttacgtttatcttgcgcggcctctggctttacctttagcagctatgcgatgcattgggtgcgtcaggcgccaggtaagggcttagagtgggtggcggttatctcttatgacggtagcaacaagtactacgccgatagcgttaaaggccgcttcacgattagccgcgacaacagcaaaaataccttatacttacagatgaattctttacgcgccgaggatacggccgtttattattgtgcccgtgaccgcacgtctcgcgccgccctggattactggggtcagtggggtcagggcaccttagttacggtgagcagcggcggttcttctcgctctagctcttctggcggcggcggtagcggcggtggcggcgaaatcgtgctgacgcagagcccggcgaccctgagcctgtctccaggcgagcgcgcgaccctgtcttgccgcgcctctcagtctgtttctagctcttatttagcgtggtaccagcagaagccaggccaagcgccacgcctgctgatttacggcgcctcttctcgtgccacgggtatcccggcgcgtttcagcggcagcggtagcggcaccgacttcaccctgaccatctctcgtctggagccagaggatttcgccgtgtactattgtcagacctggggtgatacgcacttagtgtttggccaaggtacgaaggtggagattaaa

SEQ ID NO: 27 - DNA, 744 bp, synthetic construct
  source 1..744: mol_type = other DNA
caggtgcagttagttgaaagcggcggtggtgtggtgcaaccgggtcgtagcttacgtttatcttgcgcggcctctggctttacctttagcagctatgcgatgcattgggtgcgtcaggcgccaggtaagggcttagagtgggtggcggttatctcttatgacggtagcaacaagtactacgccgatagcgttaaaggccgcttcacgattagccgcgacaacagcaaaaataccttatacttacagatgaattctttacgcgccgaggatacggccgtttattattgtgcccgtgacacgggtttcggttctttcgattattggggtcaatggggccaaggcaccctggttacggttagcagcggcggctcttctcgctcttctagctctggtggcggcggctctggcggcggtggcgaaattgttctgacccaaagcccggcgaccctgagcctgagcccaggtgaacgcgccaccctgagctgtcgtgcctctcaaagcgtttcttctagctacctggcctggtatcaacagaaaccaggtcaggccccgcgcttactgatttatggtgcgtcttctcgcgcgacgggtatcccagcgcgtttttctggcagcggctctggcaccgatttcacgctgaccatttctcgcctggaaccagaggactttgccgtttattactgctctagctatacgagctcttctacgtggggctttggccaaggtacgaaggtggagattaaa

SEQ ID NO: 28 - DNA, 744 bp, synthetic construct
  source 1..744: mol_type = other DNA
caggtgcagttagttgaaagcggcggtggtgtggtgcaaccgggtcgtagcttacgtttatcttgcgcggcctctggctttacctttagcagctatgcgatgcattgggtgcgtcaggcgccaggtaagggcttagagtgggtggcggttatctcttatgacggtagcaacaagtactacgccgatagcgttaaaggccgcttcacgattagccgcgacaacagcaaaaataccttatacttacagatgaattctttacgcgccgaggatacggccgtttattattgtgcccgtgacacgtcttctggtgccatggacatttggggccaatggggtcagggtaccctggtgacggtttctagcggcggcagctctcgctcttcttctagcggtggtggcggcagcggtggcggcggtgaaattgtgttaacccagtctccggcgaccctgagcctgagcccgggtgagcgtgccacgctgagctgccgcgcgtctcaatctgtgtcttcttcttatttagcgtggtaccagcaaaaaccgggtcaagcgccacgtttattaatttatggcgccagctctcgcgccaccggtatcccagcccgttttagcggtagcggcagcggtaccgattttacgttaaccattagccgcttagaaccggaggacttcgcggtttactattgtagctcttttggcggtaatgacaacttaatttttggccaaggtacgaaggtggagattaaa

SEQ ID NO: 29 - DNA, 738 bp, synthetic construct
  source 1..738: mol_type = other DNA
caggtgcagttagttgaaagcggcggtggtgtggtgcaaccgggtcgtagcttacgtttatcttgcgcggcctctggctttacctttagcagctatgcgatgcattgggtgcgtcaggcgccaggtaagggcttagagtgggtggcggttatctcttatgacggtagcaacaagtactacgccgatagcgttaaaggccgcttcacgattagccgcgacaacagcaaaaataccttatacttacagatgaattctttacgcgccgaggatacggccgtttattattgtgcccgtgacgttcaataccgcttcgacccgtggggccaatggggtcagggtaccctggtgacggtttctagcggcggcagctctcgctcttcttctagcggtggtggcggcagcggtggcggcggtgaaattgtgttaacccagtctccggcgaccctgagcctgagcccgggtgagcgtgccacgctgagctgccgcgcgtctcaatctgtgtcttcttcttatttagcgtggtaccagcaaaaaccgggtcaagcgccacgtttattaatttatggcgccagctctcgcgccaccggtatcccagcccgttttagcggtagcggcagcggtaccgattttacgttaaccattagccgcttagaaccggaggacttcgcggtttactattgtggccaaaataaacaatttccatggacgttcggccagggcacgaaggttgagattaaa

SEQ ID NO: 30 - DNA, 738 bp, synthetic construct
  source 1..738: mol_type = other DNA
caggtgcagttagttgaaagcggcggtggtgtggtgcaaccgggtcgtagcttacgtttatcttgcgcggcctctggctttacctttagcagctatgcgatgcattgggtgcgtcaggcgccaggtaagggcttagagtgggtggcggttatctcttatgacggtagcaacaagtactacgccgatagcgttaaaggccgcttcacgattagccgcgacaacagcaaaaataccttatacttacagatgaattctttacgcgccgaggatacggccgtttattattgtgcccgtgactggtggggtgccttcgacgtttggggtcagtggggccaaggtaccttagtgaccgtgtcttctggtggcagcagccgttcttcttcttctggtggcggtggtagcggcggcggtggcgaaatcgtgctgacccaaagcccggccaccctgagcctgagcccgggcgaacgcgccaccttatcttgccgtgcgtctcagtctgtttctagctcttacttagcgtggtaccagcaaaaaccaggccaggccccacgtttactgatctacggcgcgagctctcgtgccacgggtattccagcccgcttcagcggcagcggtagcggcaccgactttaccctgacgatcagccgtctggagccagaagatttcgccgtttattactgtcagcaatttaacagcctgggttggattttcggtcaaggcaccaaagttgagatcaaa

SEQ ID NO: 31 - DNA, 771 bp, synthetic construct
  source 1..771: mol_type = other DNA
caggtgcagttagttgaaagcggcggtggtgtggtgcaaccgggtcgtagcttacgtttatcttgcgcggcctctggctttacctttagcagctatgcgatgcattgggtgcgtcaggcgccaggtaagggcttagagtgggtggcggttatctcttatgacggtagcaacaagtactacgccgatagcgttaaaggccgcttcacgattagccgcgacaacagcaaaaataccttatacttacagatgaattctttacgcgccgaggatacggccgtttattattgtgcccgtgagcgcggtggtgactacggtagcggctactacctgccaaattatggcatggacgtttggggtcagtggggccagggcacgttagttacggttagctctggtggcagcagccgcagcagctctagcggcggcggtggcagcggtggcggcggcgaaattgtgctgacccaatctccggccacgctgagcctgtctccgggtgagcgcgcgacgttatcttgccgcgcgtctcagtctgtgagctcttcttatttagcgtggtaccaacagaaaccgggtcaggccccacgcctgttaatctacggtgcgagcagccgcgcgaccggcatcccggcgcgtttctctggcagcggctctggtaccgatttcacgttaaccatctctcgtttagaaccagaagatttcgcggtttactactgccagcaggagggttcttctccgatcacctttggccaaggtacgaaagttgagattaaa

SEQ ID NO: 32 - DNA, 774 bp, synthetic construct
  source 1..774: mol_type = other DNA
caggtgcagttagttgaaagcggcggtggtgtggtgcaaccgggtcgtagcttacgtttatcttgcgcggcctctggctttacctttagcagctatgcgatgcattgggtgcgtcaggcgccaggtaagggcttagagtgggtggcggttatctcttatgacggtagcaacaagtactacgccgatagcgttaaaggccgcttcacgattagccgcgacaacagcaaaaataccttatacttacagatgaattctttacgcgccgaggatacggccgtttattattgtgcccgtgagcgcggtggtgactacggtagcggctactacctgccaaattatggcatggacgtttggggtcagtggggccagggcacgttagttacggttagctctggtggcagcagccgcagcagctctagcggcggcggtggcagcggtggcggcggcgaaattgtgctgacccaatctccggccacgctgagcctgtctccgggtgagcgcgcgacgttatcttgccgcgcgtctcagtctgtgagctcttcttatttagcgtggtaccaacagaaaccgggtcaggccccacgcctgttaatctacggtgcgagcagccgcgcgaccggcatcccggcgcgtttctctggcagcggctctggtaccgatttcacgttaaccatctctcgtttagaaccagaagatttcgcggtttactactgccagcagtacgacacgacgccgccactgacctttggtcaaggtaccaaggttgaaatcaaa

SEQ ID NO: 33 - DNA, 771 bp, synthetic construct
  source 1..771: mol_type = other DNA
caggtgcagttagttgaaagcggcggtggtgtggtgcaaccgggtcgtagcttacgtttatcttgcgcggcctctggctttacctttagcagctatgcgatgcattgggtgcgtcaggcgccaggtaagggcttagagtgggtggcggttatctcttatgacggtagcaacaagtactacgccgatagcgttaaaggccgcttcacgattagccgcgacaacagcaaaaataccttatacttacagatgaattctttacgcgccgaggatacggccgtttattattgtgcccgtgagcgcggtggtgactacggtagcggctactacctgccaaattatggcatggacgtttggggtcagtggggccagggcacgttagttacggttagctctggtggcagcagccgcagcagctctagcggcggcggtggcagcggtggcggcggcgaaattgtgctgacccaatctccggccacgctgagcctgtctccgggtgagcgcgcgacgttatcttgccgcgcgtctcagtctgtgagctcttcttatttagcgtggtaccaacagaaaccgggtcaggccccacgcctgttaatctacggtgcgagcagccgcgcgaccggcatcccggcgcgtttctctggcagcggctctggtaccgatttcacgttaaccatctctcgtttagaaccagaagatttcgcggtttactactgccagcagtacggttcttctccgatcacctttggccaaggtacgaaagttgagattaaa

SEQ ID NO: 34 - DNA, 777 bp, synthetic construct
  source 1..777: mol_type = other DNA
caggtgcagttagttgaaagcggcggtggtgtggtgcaaccgggtcgtagcttacgtttatcttgcgcggcctctggctttacctttagcagctatgcgatgcattgggtgcgtcaggcgccaggtaagggcttagagtgggtggcggttatctcttatgacggtagcaacaagtactacgccgatagcgttaaaggccgcttcacgattagccgcgacaacagcaaaaataccttatacttacagatgaattctttacgcgccgaggatacggccgtttattattgtgcccgtgagcgcggtggtgactacggtagcggctactacctgccaaattatggcatggacgtttggggtcagtggggccagggcacgttagttacggttagctctggtggcagcagccgcagcagctctagcggcggcggtggcagcggtggcggcggcgaaattgtgctgacccaatctccggccacgctgagcctgtctccgggtgagcgcgcgacgttatcttgccgcgcgtctcagtctgtgagctcttcttatttagcgtggtaccaacagaaaccgggtcaggccccacgcctgttaatctacggtgcgagcagccgcgcgaccggcatcccggcgcgtttctctggcagcggctctggtaccgatttcacgttaaccatctctcgtttagaaccagaagatttcgcggtttactactgccagagctacgacttcggtctgggtattatggtgtttggtcaaggtaccaaggttgaaatcaaa

SEQ ID NO: 35 - DNA, 780 bp, synthetic construct
  source 1..780: mol_type = other DNA
caggtgcagttagttgaaagcggcggtggtgtggtgcaaccgggtcgtagcttacgtttatcttgcgcggcctctggctttacctttagcagctatgcgatgcattgggtgcgtcaggcgccaggtaagggcttagagtgggtggcggttatctcttatgacggtagcaacaagtactacgccgatagcgttaaaggccgcttcacgattagccgcgacaacagcaaaaataccttatacttacagatgaattctttacgcgccgaggatacggccgtttattattgtgcccgtgagcgcggtggtgactacggtagcggctactacctgccaaattatggcatggacgtttggggtcagtggggccagggcacgttagttacggttagctctggtggcagcagccgcagcagctctagcggcggcggtggcagcggtggcggcggcgaaattgtgctgacccaatctccggccacgctgagcctgtctccgggtgagcgcgcgacgttatcttgccgcgcgtctcagtctgtgagctcttcttatttagcgtggtaccaacagaaaccgggtcaggccccacgcctgttaatctacggtgcgagcagccgcgcgaccggcatcccggcgcgtttctctggcagcggctctggtaccgatttcacgttaaccatctctcgtttagaaccagaagatttcgcggtttactactgccagagctacgacatctctaatttaagccatgtggttttcggtcagggtacgaaagttgaaattaaa

SEQ ID NO: 36 - DNA, 771 bp, synthetic construct
  source 1..771: mol_type = other DNA
caggtgcagttagttgaaagcggcggtggtgtggtgcaaccgggtcgtagcttacgtttatcttgcgcggcctctggctttacctttagcagctatgcgatgcattgggtgcgtcaggcgccaggtaagggcttagagtgggtggcggttatctcttatgacggtagcaacaagtactacgccgatagcgttaaaggccgcttcacgattagccgcgacaacagcaaaaataccttatacttacagatgaattctttacgcgccgaggatacggccgtttattattgtgcccgtgagcgcggtggtgactacggtagcggctactacctgccaaattatggcatggacgtttggggtcagtggggccagggcacgttagttacggttagctctggtggcagcagccgcagcagctctagcggcggcggtggcagcggtggcggcggcgaaattgtgctgacccaatctccggccacgctgagcctgtctccgggtgagcgcgcgacgttatcttgccgcgcgtctcagtctgtgagctcttcttatttagcgtggtaccaacagaaaccgggtcaggccccacgcctgttaatctacggtgcgagcagccgcgcgaccggcatcccggcgcgtttctctggcagcggctctggtaccgatttcacgttaaccatctctcgtttagaaccagaagatttcgcggtttactactgcagcagctacacgtcttctagcaaggtgtttggccaaggtacgaaagttgagattaaa

SEQ ID NO: 37 - DNA, 747 bp, synthetic construct
  source 1..747: mol_type = other DNA
caggtgcagttagttgaaagcggcggtggtgtggtgcaaccgggtcgtagcttacgtttatcttgcgcggcctctggctttacctttagcagctatgcgatgcattgggtgcgtcaggcgccaggtaagggcttagagtgggtggcggttatctcttatgacggtagcaacaagtactacgccgatagcgttaaaggccgcttcacgattagccgcgacaacagcaaaaataccttatacttacagatgaattctttacgcgccgaggatacggccgtttattattgtgcccgtgagtggggtggttcttggttcggtatggacccgtggggccaatggggtcagggtaccctggtgacggtttctagcggcggcagctctcgctcttcttctagcggtggtggcggcagcggtggcggcggtgaaattgtgttaacccagtctccggcgaccctgagcctgagcccgggtgagcgtgccacgctgagctgccgcgcgtctcaatctgtgtcttcttcttatttagcgtggtaccagcaaaaaccgggtcaagcgccacgtttattaatttatggcgccagctctcgcgccaccggtatcccagcccgttttagcggtagcggcagcggtaccgattttacgttaaccattagccgcttagaaccggaggacttcgcggtttactattgtcagcaatataattctagctctatcacgtttggccagggtacgaaggttgaaatcaaa

SEQ ID NO: 38 - DNA, 747 bp, synthetic construct
  source 1..747: mol_type = other DNA
caggtgcagttagttgaaagcggcggtggtgtggtgcaaccgggtcgtagcttacgtttatcttgcgcggcctctggctttacctttagcagctatgcgatgcattgggtgcgtcaggcgccaggtaagggcttagagtgggtggcggttatctcttatgacggtagcaacaagtactacgccgatagcgttaaaggccgcttcacgattagccgcgacaacagcaaaaataccttatacttacagatgaattctttacgcgccgaggatacggccgtttattattgtgcccgtgagtggggtggttcttggttcggtatggacccgtggggccaatggggtcagggtaccctggtgacggtttctagcggcggcagctctcgctcttcttctagcggtggtggcggcagcggtggcggcggtgaaattgtgttaacccagtctccggcgaccctgagcctgagcccgggtgagcgtgccacgctgagctgccgcgcgtctcaatctgtgtcttcttcttatttagcgtggtaccagcaaaaaccgggtcaagcgccacgtttattaatttatggcgccagctctcgcgccaccggtatcccagcccgttttagcggtagcggcagcggtaccgattttacgttaaccattagccgcttagaaccggaggacttcgcggtttactattgtcagtcttatgattctagcaacgccgtttttggccagggtacgaaggttgaaatcaaa

SEQ ID NO: 39 - DNA, 753 bp, synthetic construct
  source 1..753: mol_type = other DNA
caggtgcagttagttgaaagcggcggtggtgtggtgcaaccgggtcgtagcttacgtttatcttgcgcggcctctggctttacctttagcagctatgcgatgcattgggtgcgtcaggcgccaggtaagggcttagagtgggtggcggttatctcttatgacggtagcaacaagtactacgccgatagcgttaaaggccgcttcacgattagccgcgacaacagcaaaaataccttatacttacagatgaattctttacgcgccgaggatacggccgtttattattgtgcccgtgagtggttaggtacgacgggtatggacgtgtggggccaatggggtcagggtaccctggtgacggtttctagcggcggcagctctcgctcttcttctagcggtggtggcggcagcggtggcggcggtgaaattgtgttaacccagtctccggcgaccctgagcctgagcccgggtgagcgtgccacgctgagctgccgcgcgtctcaatctgtgtcttcttcttatttagcgtggtaccagcaaaaaccgggtcaagcgccacgtttattaatttatggcgccagctctcgcgccaccggtatcccagcccgttttagcggtagcggcagcggtaccgattttacgttaaccattagccgcttagaaccggaggacttcgcggtttactattgtggcacgtgggatagctctagcgccccattctatgtgtttggtcaaggtacgaaagttgaaattaaa

SEQ ID NO: 40 - DNA, 753 bp, synthetic construct
  source 1..753: mol_type = other DNA
caggtgcagttagttgaaagcggcggtggtgtggtgcaaccgggtcgtagcttacgtttatcttgcgcggcctctggctttacctttagcagctatgcgatgcattgggtgcgtcaggcgccaggtaagggcttagagtgggtggcggttatctcttatgacggtagcaacaagtactacgccgatagcgttaaaggccgcttcacgattagccgcgacaacagcaaaaataccttatacttacagatgaattctttacgcgccgaggatacggccgtttattattgtgcccgtgagtggttaggtacgacgggtatggacgtgtggggccaatggggtcagggtaccctggtgacggtttctagcggcggcagctctcgctcttcttctagcggtggtggcggcagcggtggcggcggtgaaattgtgttaacccagtctccggcgaccctgagcctgagcccgggtgagcgtgccacgctgagctgccgcgcgtctcaatctgtgtcttcttcttatttagcgtggtaccagcaaaaaccgggtcaagcgccacgtttattaatttatggcgccagctctcgcgccaccggtatcccagcccgttttagcggtagcggcagcggtaccgattttacgttaaccattagccgcttagaaccggaggacttcgcggtttactattgtggcacgtgggatagctctagcggtccattaaaagtgtttggtcaaggtacgaaagttgaaattaaa

SEQ ID NO: 41 - DNA, 747 bp, synthetic construct
  source 1..747: mol_type = other DNA
caggtgcagttagttgaaagcggcggtggtgtggtgcaaccgggtcgtagcttacgtttatcttgcgcggcctctggctttacctttagcagctatgcgatgcattgggtgcgtcaggcgccaggtaagggcttagagtgggtggcggttatctcttatgacggtagcaacaagtactacgccgatagcgttaaaggccgcttcacgattagccgcgacaacagcaaaaataccttatacttacagatgaattctttacgcgccgaggatacggccgtttattattgtgcccgtgagtactacggtatcgacgtttggggccagtggggtcaaggcacgctggtgaccgtttcttctggcggcagcagccgctcttcttcttctggcggtggtggcagcggcggtggcggcgagattgtgctgacgcagagcccagcgaccctgagcctgagcccgggcgagcgcgcgacgttaagctgccgtgccagccaatctgttagctcttcttacctggcctggtatcaacagaagccgggccaagccccgcgcctgttaatctatggcgcgtctagccgcgccacgggcatcccagcccgctttagcggctctggcagcggcacggattttaccttaacgattagccgtttagagccggaagacttcgccgtgtactactgccaaagctacgatagctctctgtcttctccaaatgtggtgttcggtcaaggtaccaaggtggaaattaaa

SEQ ID NO: 42 - DNA, 756 bp, synthetic construct
  source 1..756: mol_type = other DNA
caggtgcagttagttgaaagcggcggtggtgtggtgcaaccgggtcgtagcttacgtttatcttgcgcggcctctggctttacctttagcagctatgcgatgcattgggtgcgtcaggcgccaggtaagggcttagagtgggtggcggttatctcttatgacggtagcaacaagtactacgccgatagcgttaaaggccgcttcacgattagccgcgacaacagcaaaaataccttatacttacagatgaattctttacgcgccgaggatacggccgtttattattgtgcccgtttcggtgttggttacgacacgcattatatgtacttcgatcactggggccagtggggccaaggtacgctggtgaccgtgtcttctggtggttctagccgctctagcagcagcggtggcggcggtagcggcggcggtggcgaaatcgtgctgacccagagcccggcgaccttatctctgtctccaggcgaacgtgccaccttatcttgtcgtgcctctcaaagcgttagctctagctacctggcgtggtaccaacagaagccgggtcaagcgccgcgtttactgatctacggtgcgtcttctcgcgccaccggcattccagcgcgtttttctggcagcggctctggtaccgattttacgttaaccatttctcgcttagaaccagaggatttcgcggtttattattgtcagcaattccacagctttccgttaacgttcggtcagggtaccaaagtggagatcaaa

SEQ ID NO: 43 - DNA, 741 bp, synthetic construct
  source 1..741: mol_type = other DNA
caggtgcagttagttgaaagcggcggtggtgtggtgcaaccgggtcgtagcttacgtttatcttgcgcggcctctggctttacctttagcagctatgcgatgcattgggtgcgtcaggcgccaggtaagggcttagagtgggtggcggttatctcttatgacggtagcaacaagtactacgccgatagcgttaaaggccgcttcacgattagccgcgacaacagcaaaaataccttatacttacagatgaattctttacgcgccgaggatacggccgtttattattgtgcccgtggtgacttcttattccgctactggggccagtggggtcaaggcacgctggtgaccgtttcttctggcggcagcagccgctcttcttcttctggcggtggtggcagcggcggtggcggcgagattgtgctgacgcagagcccagcgaccctgagcctgagcccgggcgagcgcgcgacgttaagctgccgtgccagccaatctgttagctcttcttacctggcctggtatcaacagaagccgggccaagccccgcgcctgttaatctatggcgcgtctagccgcgccacgggcatcccagcccgctttagcggctctggcagcggcacggattttaccttaacgattagccgtttagagccggaagacttcgccgtgtactactgccaagcgtgggacagcagcacgccgttctacgtttttggccagggtacgaaggttgaaatcaaa

SEQ ID NO: 44 - DNA, 750 bp, synthetic construct
  source 1..750: mol_type = other DNA
caggtgcagttagttgaaagcggcggtggtgtggtgcaaccgggtcgtagcttacgtttatcttgcgcggcctctggctttacctttagcagctatgcgatgcattgggtgcgtcaggcgccaggtaagggcttagagtgggtggcggttatctcttatgacggtagcaacaagtactacgccgatagcgttaaaggccgcttcacgattagccgcgacaacagcaaaaataccttatacttacagatgaattctttacgcgccgaggatacggccgtttattattgtgcccgtggtgactcttctggttgggactactttgatcactggggtcagtggggtcagggcaccttagttacggtgagcagcggcggttcttctcgctctagctcttctggcggcggcggtagcggcggtggcggcgaaatcgtgctgacgcagagcccggcgaccctgagcctgtctccaggcgagcgcgcgaccctgtcttgccgcgcctctcagtctgtttctagctcttatttagcgtggtaccagcagaagccaggccaagcgccacgcctgctgatttacggcgcctcttctcgtgccacgggtatcccggcgcgtttcagcggcagcggtagcggcaccgacttcaccctgaccatctctcgtctggagccagaggatttcgccgtgtactattgtcagcagtctaattctccaccaccgattaccttcggtcaaggtaccaaggtggaaattaaa

SEQ ID NO: 45 - DNA, 741 bp, synthetic construct
  source 1..741: mol_type = other DNA
caggtgcagttagttgaaagcggcggtggtgtggtgcaaccgggtcgtagcttacgtttatcttgcgcggcctctggctttacctttagcagctatgcgatgcattgggtgcgtcaggcgccaggtaagggcttagagtgggtggcggttatctcttatgacggtagcaacaagtactacgccgatagcgttaaaggccgcttcacgattagccgcgacaacagcaaaaataccttatacttacagatgaattctttacgcgccgaggatacggccgtttattattgtgcccgtggtggtgcctctatcggtgtttttgatgtttggggtcagtggggtcagggcaccttagttacggtgagcagcggcggttcttctcgctctagctcttctggcggcggcggtagcggcggtggcggcgaaatcgtgctgacgcagagcccggcgaccctgagcctgtctccaggcgagcgcgcgaccctgtcttgccgcgcctctcagtctgtttctagctcttatttagcgtggtaccagcagaagccaggccaagcgccacgcctgctgatttacggcgcctcttctcgtgccacgggtatcccggcgcgtttcagcggcagcggtagcggcaccgacttcaccctgaccatctctcgtctggagccagaggatttcgccgtgtactattgtcagacctggggtaccggtatggttttcggccagggcacgaaggttgagattaaa

SEQ ID NO: 46 - DNA, 750 bp, synthetic construct
  source 1..750: mol_type = other DNA
caggtgcagttagttgaaagcggcggtggtgtggtgcaaccgggtcgtagcttacgtttatcttgcgcggcctctggctttacctttagcagctatgcgatgcattgggtgcgtcaggcgccaggtaagggcttagagtgggtggcggttatctcttatgacggtagcaacaagtactacgccgatagcgttaaaggccgcttcacgattagccgcgacaacagcaaaaataccttatacttacagatgaattctttacgcgccgaggatacggccgtttattattgtgcccgtggtggttctgttgacatcgcctatggcttcgactattggggtcagtggggccagggtacgttagtgaccgtgagctctggtggttcttctcgttcttctagcagcggcggtggcggctctggcggcggcggtgaaattgttctgacccagagcccggcgaccctgtctttaagcccaggtgaacgtgcgacgctgtcttgtcgcgcgtctcaatctgtgtctagctcttatttagcgtggtatcaacaaaaaccaggccaagccccgcgtctgttaatttacggtgccagctctcgcgccacgggcattccggcccgttttagcggtagcggcagcggtacggattttaccttaacgattagccgcttagagccggaggactttgccgtgtactattgccaacaggccaactcttttccgctgacgttcggtcaaggcacgaaagtggaaatcaaa

SEQ ID NO: 47 - DNA, 747 bp, synthetic construct
  source 1..747: mol_type = other DNA
caggtgcagttagttgaaagcggcggtggtgtggtgcaaccgggtcgtagcttacgtttatcttgcgcggcctctggctttacctttagcagctatgcgatgcattgggtgcgtcaggcgccaggtaagggcttagagtgggtggcggttatctcttatgacggtagcaacaagtactacgccgatagcgttaaaggccgcttcacgattagccgcgacaacagcaaaaataccttatacttacagatgaattctttacgcgccgaggatacggccgtttattattgtgcccgtggtttaatcatgacgccaggttacctggattactggggtcagtggggtcagggcaccttagttacggtgagcagcggcggttcttctcgctctagctcttctggcggcggcggtagcggcggtggcggcgaaatcgtgctgacgcagagcccggcgaccctgagcctgtctccaggcgagcgcgcgaccctgtcttgccgcgcctctcagtctgtttctagctcttatttagcgtggtaccagcagaagccaggccaagcgccacgcctgctgatttacggcgcctcttctcgtgccacgggtatcccggcgcgtttcagcggcagcggtagcggcaccgacttcaccctgaccatctctcgtctggagccagaggatttcgccgtgtactattgtcagacctggggtaccggtggtttagtgtttggccaaggtacgaaggtggagattaaa

SEQ ID NO: 48 - DNA, 747 bp, synthetic construct
  source 1..747: mol_type = other DNA
caggtgcagttagttgaaagcggcggtggtgtggtgcaaccgggtcgtagcttacgtttatcttgcgcggcctctggctttacctttagcagctatgcgatgcattgggtgcgtcaggcgccaggtaagggcttagagtgggtggcggttatctcttatgacggtagcaacaagtactacgccgatagcgttaaaggccgcttcacgattagccgcgacaacagcaaaaataccttatacttacagatgaattctttacgcgccgaggatacggccgtttattattgtgcccgtggtccaggttactcttacgccgcgatggatgtttggggtcagtggggtcagggcaccttagttacggtgagcagcggcggttcttctcgctctagctcttctggcggcggcggtagcggcggtggcggcgaaatcgtgctgacgcagagcccggcgaccctgagcctgtctccaggcgagcgcgcgaccctgtcttgccgcgcctctcagtctgtttctagctcttatttagcgtggtaccagcagaagccaggccaagcgccacgcctgctgatttacggcgcctcttctcgtgccacgggtatcccggcgcgtttcagcggcagcggtagcggcaccgacttcaccctgaccatctctcgtctggagccagaggatttcgccgtgtactattgtcagcaggactattctttcccaccgacctttggtcaaggtacgaaagttgaaattaaa

SEQ ID NO: 49 - DNA, 750 bp, synthetic construct
  source 1..750: mol_type = other DNA
caggtgcagttagttgaaagcggcggtggtgtggtgcaaccgggtcgtagcttacgtttatcttgcgcggcctctggctttacctttagcagctatgcgatgcattgggtgcgtcaggcgccaggtaagggcttagagtgggtggcggttatctcttatgacggtagcaacaagtactacgccgatagcgttaaaggccgcttcacgattagccgcgacaacagcaaaaataccttatacttacagatgaattctttacgcgccgaggatacggccgtttattattgtgcccgtggtccacgcttcggtgagttaccgtttgactactggggccaatggggccagggcacgttagttaccgtgagcagcggtggttcttctcgcagctcttctagcggcggcggtggcagcggtggcggcggcgagattgtgttaacccagagcccggcgaccctgagcttatctccgggtgagcgtgcgaccttaagctgtcgcgccagccaatctgttagctctagctacctggcctggtatcagcaaaagccgggtcaggccccacgtctgctgatctatggtgcctctagccgcgccacgggtattccggcgcgctttagcggctctggcagcggcacggactttaccctgacgatcagccgtttagagccagaagacttcgcggtttattactgccagcaaagctactctaacaccacctggctgttcggtcaaggtaccaaggtggaaattaaa

SEQ ID NO: 50 - DNA, 768 bp, synthetic construct
  source 1..768: mol_type = other DNA
caggtgcagttagttgaaagcggcggtggtgtggtgcaaccgggtcgtagcttacgtttatcttgcgcggcctctggctttacctttagcagctatgcgatgcattgggtgcgtcaggcgccaggtaagggcttagagtgggtggcggttatctcttatgacggtagcaacaagtactacgccgatagcgttaaaggccgcttcacgattagccgcgacaacagcaaaaataccttatacttacagatgaattctttacgcgccgaggatacggccgtttattattgtgcccgtggtcgctacttagcctcttctagcgcgcacggtggctactatgcgctggactactggggtcagtggggccagggcacgttagttacggttagctctggtggcagcagccgcagcagctctagcggcggcggtggcagcggtggcggcggcgaaattgtgctgacccaatctccggccacgctgagcctgtctccgggtgagcgcgcgacgttatcttgccgcgcgtctcagtctgtgagctcttcttatttagcgtggtaccaacagaaaccgggtcaggccccacgcctgttaatctacggtgcgagcagccgcgcgaccggcatcccggcgcgtttctctggcagcggctctggtaccgatttcacgttaaccatctctcgtttagaaccagaagatttcgcggtttactactgccagcaggcctactctccaccgatcagctttggccaaggtacgaaagttgagattaaa

SEQ ID NO: 51 - DNA, 768 bp, synthetic construct
  source 1..768: mol_type = other DNA
caggtgcagttagttgaaagcggcggtggtgtggtgcaaccgggtcgtagcttacgtttatcttgcgcggcctctggctttacctttagcagctatgcgatgcattgggtgcgtcaggcgccaggtaagggcttagagtgggtggcggttatctcttatgacggtagcaacaagtactacgccgatagcgttaaaggccgcttcacgattagccgcgacaacagcaaaaataccttatacttacagatgaattctttacgcgccgaggatacggccgtttattattgtgcccgtggtcgctacttagcctcttctagcgcgcacggtggctactatgcgctggactactggggtcagtggggccagggcacgttagttacggttagctctggtggcagcagccgcagcagctctagcggcggcggtggcagcggtggcggcggcgaaattgtgctgacccaatctccggccacgctgagcctgtctccgggtgagcgcgcgacgttatcttgccgcgcgtctcagtctgtgagctcttcttatttagcgtggtaccaacagaaaccgggtcaggccccacgcctgttaatctacggtgcgagcagccgcgcgaccggcatcccggcgcgtttctctggcagcggctctggtaccgatttcacgttaaccatctctcgtttagaaccagaagatttcgcggtttactactgccagcaggcctactctccaccgatcacctttggccaaggtacgaaagttgagattaaa

SEQ ID NO: 52 - DNA, 762 bp, synthetic construct
  source 1..762: mol_type = other DNA
caggtgcagttagttgaaagcggcggtggtgtggtgcaaccgggtcgtagcttacgtttatcttgcgcggcctctggctttacctttagcagctatgcgatgcattgggtgcgtcaggcgccaggtaagggcttagagtgggtggcggttatctcttatgacggtagcaacaagtactacgccgatagcgttaaaggccgcttcacgattagccgcgacaacagcaaaaataccttatacttacagatgaattctttacgcgccgaggatacggccgtttattattgtgcccgtggtcgctaccgcaacttatcttatgatgacgacgatttcgatatttggggccaatggggtcaaggcaccctggtgacggtttcttctggtggctcttctcgtagcagctctagcggcggtggcggcagcggtggcggcggtgaaattgtgctgacccagagcccggccacgctgtctttaagcccgggcgagcgtgccacgttaagctgtcgcgccagccaaagcgttagctctagctatttagcctggtatcaacagaagccaggccaggcgccacgtttattaatctatggtgcctcttctcgtgcgaccggtattccggcgcgctttagcggctctggtagcggcaccgacttcaccctgacgatctctcgtttagagccggaggatttcgcggtgtactattgtcaagcctgggatagcagcacgggtgttgtttttggtcagggcaccaaggttgagattaaa

SEQ ID NO: 53 - DNA, 750 bp, synthetic construct
  source 1..750: mol_type = other DNA
caggtgcagttagttgaaagcggcggtggtgtggtgcaaccgggtcgtagcttacgtttatcttgcgcggcctctggctttacctttagcagctatgcgatgcattgggtgcgtcaggcgccaggtaagggcttagagtgggtggcggttatctcttatgacggtagcaacaagtactacgccgatagcgttaaaggccgcttcacgattagccgcgacaacagcaaaaataccttatacttacagatgaattctttacgcgccgaggatacggccgtttattattgtgcccgtggttctgtttctacgggtatcgcgttttactactggggccaatggggccagggcacgttagttaccgtgagcagcggtggttcttctcgcagctcttctagcggcggcggtggcagcggtggcggcggcgagattgtgttaacccagagcccggcgaccctgagcttatctccgggtgagcgtgcgaccttaagctgtcgcgccagccaatctgttagctctagctacctggcctggtatcagcaaaagccgggtcaggccccacgtctgctgatctatggtgcctctagccgcgccacgggtattccggcgcgctttagcggctctggcagcggcacggactttaccctgacgatcagccgtttagagccagaagacttcgcggtttattactgcagctcttatacgtcttctagcagcctggttttcggtcaaggcacgaaagtggaaatcaaa

SEQ ID NO: 54 - DNA, 741 bp, synthetic construct
  source 1..741: mol_type = other DNA
caggtgcagttagttgaaagcggcggtggtgtggtgcaaccgggtcgtagcttacgtttatcttgcgcggcctctggctttacctttagcagctatgcgatgcattgggtgcgtcaggcgccaggtaagggcttagagtgggtggcggttatctcttatgacggtagcaacaagtactacgccgatagcgttaaaggccgcttcacgattagccgcgacaacagcaaaaataccttatacttacagatgaattctttacgcgccgaggatacggccgtttattattgtgcccgtcacgacttctctacgggtgcctatgattggggtcaatggggccaaggcaccctggttacggttagcagcggcggctcttctcgctcttctagctctggtggcggcggctctggcggcggtggcgaaattgttctgacccaaagcccggcgaccctgagcctgagcccaggtgaacgcgccaccctgagctgtcgtgcctctcaaagcgtttcttctagctacctggcctggtatcaacagaaaccaggtcaggccccgcgcttactgatttatggtgcgtcttctcgcgcgacgggtatcccagcgcgtttttctggcagcggctctggcaccgatttcacgctgaccatttctcgcctggaaccagaggactttgccgtttattactgcatgcaaggcgcgcgctggccgttagccttcggccagggcacgaaggttgagattaaa

SEQ ID NO: 55 - DNA, 771 bp, synthetic construct
  source 1..771: mol_type = other DNA
caggtgcagttagttgaaagcggcggtggtgtggtgcaaccgggtcgtagcttacgtttatcttgcgcggcctctggctttacctttagcagctatgcgatgcattgggtgcgtcaggcgccaggtaagggcttagagtgggtggcggttatctcttatgacggtagcaacaagtactacgccgatagcgttaaaggccgcttcacgattagccgcgacaacagcaaaaataccttatacttacagatgaattctttacgcgccgaggatacggccgtttattattgtgcccgtttaggttacaagggtttcgcctatctgggttcttattctagctatgcgttcgacttatggggccagtggggccagggtacgttagttacggtgtcttctggcggcagctctcgtagctctagcagcggcggtggcggctctggcggcggcggcgaaattgtgctgacgcaaagcccagccaccctgagcttaagcccaggtgagcgtgccacgttaagctgtcgtgccagccaaagcgtgtcttctagctacctggcctggtaccagcagaaaccaggccaagccccacgtttattaatctacggcgcgagctctcgtgcgaccggtattccggcgcgcttcagcggcagcggttctggcaccgacttcacgctgacgatcagccgcctggagccggaagactttgccgtttactattgccagcaatctaactctccgccaattacctttggtcaaggtaccaaggttgaaatcaaa

SEQ ID NO: 56 - DNA, 747 bp, synthetic construct
  source 1..747: mol_type = other DNA
caggtgcagttagttgaaagcggcggtggtgtggtgcaaccgggtcgtagcttacgtttatcttgcgcggcctctggctttacctttagcagctatgcgatgcattgggtgcgtcaggcgccaggtaagggcttagagtgggtggcggttatctcttatgacggtagcaacaagtactacgccgatagcgttaaaggccgcttcacgattagccgcgacaacagcaaaaataccttatacttacagatgaattctttacgcgccgaggatacggccgtttattattgtgcccgtttatctggtacgtactactacgcgatggatgtttggggtcagtggggtcagggcaccttagttacggtgagcagcggcggttcttctcgctctagctcttctggcggcggcggtagcggcggtggcggcgaaatcgtgctgacgcagagcccggcgaccctgagcctgtctccaggcgagcgcgcgaccctgtcttgccgcgcctctcagtctgtttctagctcttatttagcgtggtaccagcagaagccaggccaagcgccacgcctgctgatttacggcgcctcttctcgtgccacgggtatcccggcgcgtttcagcggcagcggtagcggcaccgacttcaccctgaccatctctcgtctggagccagaggatttcgccgtgtactattgtcagcagtctgatcgcttaccactgacctttggtcaaggtacgaaagttgaaattaaa

SEQ ID NO: 57 - DNA, 756 bp, synthetic construct
  source 1..756: mol_type = other DNA
caggtgcagttagttgaaagcggcggtggtgtggtgcaaccgggtcgtagcttacgtttatcttgcgcggcctctggctttacctttagcagctatgcgatgcattgggtgcgtcaggcgccaggtaagggcttagagtgggtggcggttatctcttatgacggtagcaacaagtactacgccgatagcgttaaaggccgcttcacgattagccgcgacaacagcaaaaataccttatacttacagatgaattctttacgcgccgaggatacggccgtttattattgtgcccgtttataccacacggcctaccgctatacctactactttgacgtgtggggccagtggggtcaaggtaccctggtgaccgtttcttctggtggtagctctcgcagcagcagctctggcggcggtggcagcggcggtggcggcgagattgtgctgacccagagcccggcgacgttaagcttatctccgggcgaacgcgcgacgttatcttgccgcgcctctcagtctgtgtctagctcttatctggcctggtaccagcaaaaaccaggtcaggcgccgcgcctgttaatctacggcgcctcttctcgcgcgaccggcatcccggcgcgtttcagcggcagcggttctggcaccgatttcacgctgaccatctctcgcctggagccagaagactttgccgtgtattactgccacgtttgggacagcagcgatgttgttttcggtcagggtaccaaagtggagatcaaa

SEQ ID NO: 58 - DNA, 765 bp, synthetic construct
  source 1..765: mol_type = other DNA
caggtgcagttagttgaaagcggcggtggtgtggtgcaaccgggtcgtagcttacgtttatcttgcgcggcctctggctttacctttagcagctatgcgatgcattgggtgcgtcaggcgccaggtaagggcttagagtgggtggcggttatctcttatgacggtagcaacaagtactacgccgatagcgttaaaggccgcttcacgattagccgcgacaacagcaaaaataccttatacttacagatgaattctttacgcgccgaggatacggccgtttattattgtgcccgtatgcgctggggtatctaccgcggtaagctgagcgtttacatggatgtttggggccagtggggccaaggtacgctggtgaccgtgtcttctggtggttctagccgctctagcagcagcggtggcggcggtagcggcggcggtggcgaaatcgtgctgacccagagcccggcgaccttatctctgtctccaggcgaacgtgccaccttatcttgtcgtgcctctcaaagcgttagctctagctacctggcgtggtaccaacagaagccgggtcaagcgccgcgtttactgatctacggtgcgtcttctcgcgccaccggcattccagcgcgtttttctggcagcggctctggtaccgattttacgttaaccatttctcgcttagaaccagaggatttcgcggtttattattgtcagtcttacgacagcagcctgtctggtgttttcggccaaggcaccaaagttgagatcaaa

SEQ ID NO: 59 - DNA, 741 bp, synthetic construct
  source 1..741: mol_type = other DNA
caggtgcagttagttgaaagcggcggtggtgtggtgcaaccgggtcgtagcttacgtttatcttgcgcggcctctggctttacctttagcagctatgcgatgcattgggtgcgtcaggcgccaggtaagggcttagagtgggtggcggttatctcttatgacggtagcaacaagtactacgccgatagcgttaaaggccgcttcacgattagccgcgacaacagcaaaaataccttatacttacagatgaattctttacgcgccgaggatacggccgtttattattgtgcccgtatgtctcgctacggtgccttcgacctgtggggccaatggggtcagggtaccctggtgacggtttctagcggcggcagctctcgctcttcttctagcggtggtggcggcagcggtggcggcggtgaaattgtgttaacccagtctccggcgaccctgagcctgagcccgggtgagcgtgccacgctgagctgccgcgcgtctcaatctgtgtcttcttcttatttagcgtggtaccagcaaaaaccgggtcaagcgccacgtttattaatttatggcgccagctctcgcgccaccggtatcccagcccgttttagcggtagcggcagcggtaccgattttacgttaaccattagccgcttagaaccggaggacttcgcggtttactattgtcagcaatataataactggccgttaacgttcggccagggcacgaaggttgagattaaa

SEQ ID NO: 60 - DNA, 738 bp, synthetic construct
  source 1..738: mol_type = other DNA
caggtgcagttagttgaaagcggcggtggtgtggtgcaaccgggtcgtagcttacgtttatcttgcgcggcctctggctttacctttagcagctatgcgatgcattgggtgcgtcaggcgccaggtaagggcttagagtgggtggcggttatctcttatgacggtagcaacaagtactacgccgatagcgttaaaggccgcttcacgattagccgcgacaacagcaaaaataccttatacttacagatgaattctttacgcgccgaggatacggccgtttattattgtgcccgtaaccaccactctgacttcgaccattggggccaatggggtcagggtaccctggtgacggtttctagcggcggcagctctcgctcttcttctagcggtggtggcggcagcggtggcggcggtgaaattgtgttaacccagtctccggcgaccctgagcctgagcccgggtgagcgtgccacgctgagctgccgcgcgtctcaatctgtgtcttcttcttatttagcgtggtaccagcaaaaaccgggtcaagcgccacgtttattaatttatggcgccagctctcgcgccaccggtatcccagcccgttttagcggtagcggcagcggtaccgattttacgttaaccattagccgcttagaaccggaggacttcgcggtttactattgtcaggagtataatgcctatccaacgacgtttggccagggtacgaaggttgaaatcaaa

SEQ ID NO: 61 - DNA, 738 bp, synthetic construct
  source 1..738: mol_type = other DNA
caggtgcagttagttgaaagcggcggtggtgtggtgcaaccgggtcgtagcttacgtttatcttgcgcggcctctggctttacctttagcagctatgcgatgcattgggtgcgtcaggcgccaggtaagggcttagagtgggtggcggttatctcttatgacggtagcaacaagtactacgccgatagcgttaaaggccgcttcacgattagccgcgacaacagcaaaaataccttatacttacagatgaattctttacgcgccgaggatacggccgtttattattgtgcccgtaaccaccactctgacttcgaccattggggccaatggggtcagggtaccctggtgacggtttctagcggcggcagctctcgctcttcttctagcggtggtggcggcagcggtggcggcggtgaaattgtgttaacccagtctccggcgaccctgagcctgagcccgggtgagcgtgccacgctgagctgccgcgcgtctcaatctgtgtcttcttcttatttagcgtggtaccagcaaaaaccgggtcaagcgccacgtttattaatttatggcgccagctctcgcgccaccggtatcccagcccgttttagcggtagcggcagcggtaccgattttacgttaaccattagccgcttagaaccggaggacttcgcggtttactattgtcagcaaaccgtgacgccgccattcacgtttggccagggtacgaaggttgaaatcaaa

SEQ ID NO: 62 - DNA, 738 bp, synthetic construct
  source 1..738: mol_type = other DNA
caggtgcagttagttgaaagcggcggtggtgtggtgcaaccgggtcgtagcttacgtttatcttgcgcggcctctggctttacctttagcagctatgcgatgcattgggtgcgtcaggcgccaggtaagggcttagagtgggtggcggttatctcttatgacggtagcaacaagtactacgccgatagcgttaaaggccgcttcacgattagccgcgacaacagcaaaaataccttatacttacagatgaattctttacgcgccgaggatacggccgtttattattgtgcccgtaaccaccactctgacttcgaccattggggccaatggggtcagggtaccctggtgacggtttctagcggcggcagctctcgctcttcttctagcggtggtggcggcagcggtggcggcggtgaaattgtgttaacccagtctccggcgaccctgagcctgagcccgggtgagcgtgccacgctgagctgccgcgcgtctcaatctgtgtcttcttcttatttagcgtggtaccagcaaaaaccgggtcaagcgccacgtttattaatttatggcgccagctctcgcgccaccggtatcccagcccgttttagcggtagcggcagcggtaccgattttacgttaaccattagccgcttagaaccggaggacttcgcggtttactattgtcagcaatatggctctagcccacgcacgtttggccagggtacgaaggttgaaatcaaa

SEQ ID NO: 63 - DNA, 738 bp, synthetic construct
  source 1..738: mol_type = other DNA
caggtgcagttagttgaaagcggcggtggtgtggtgcaaccgggtcgtagcttacgtttatcttgcgcggcctctggctttacctttagcagctatgcgatgcattgggtgcgtcaggcgccaggtaagggcttagagtgggtggcggttatctcttatgacggtagcaacaagtactacgccgatagcgttaaaggccgcttcacgattagccgcgacaacagcaaaaataccttatacttacagatgaattctttacgcgccgaggatacggccgtttattattgtgcccgtaaccaccactctgacttcgaccattggggccaatggggtcagggtaccctggtgacggtttctagcggcggcagctctcgctcttcttctagcggtggtggcggcagcggtggcggcggtgaaattgtgttaacccagtctccggcgaccctgagcctgagcccgggtgagcgtgccacgctgagctgccgcgcgtctcaatctgtgtcttcttcttatttagcgtggtaccagcaaaaaccgggtcaagcgccacgtttattaatttatggcgccagctctcgcgccaccggtatcccagcccgttttagcggtagcggcagcggtaccgattttacgttaaccattagccgcttagaaccggaggacttcgcggtttactattgtcagcaatattattctaccccacgcacgtttggccagggtacgaaggttgaaatcaaa

SEQ ID NO: 64 - DNA, 750 bp, synthetic construct
  source 1..750: mol_type = other DNA
caggtgcagttagttgaaagcggcggtggtgtggtgcaaccgggtcgtagcttacgtttatcttgcgcggcctctggctttacctttagcagctatgcgatgcattgggtgcgtcaggcgccaggtaagggcttagagtgggtggcggttatctcttatgacggtagcaacaagtactacgccgatagcgttaaaggccgcttcacgattagccgcgacaacagcaaaaataccttatacttacagatgaattctttacgcgccgaggatacggccgtttattattgtgcccgtaaccgcggtacgggtgacttagattattggggtcaatggggccaaggcaccctggttacggttagcagcggcggctcttctcgctcttctagctctggtggcggcggctctggcggcggtggcgaaattgttctgacccaaagcccggcgaccctgagcctgagcccaggtgaacgcgccaccctgagctgtcgtgcctctcaaagcgtttcttctagctacctggcctggtatcaacagaaaccaggtcaggccccgcgcttactgatttatggtgcgtcttctcgcgcgacgggtatcccagcgcgtttttctggcagcggctctggcaccgatttcacgctgaccatttctcgcctggaaccagaggactttgccgtttattactgccaagtgtgggataacggctctgaccacctggtggtgttcggtcaaggtaccaaggtggaaattaaa

SEQ ID NO: 65 - DNA, 750 bp, synthetic construct
  source 1..750: mol_type = other DNA
caggtgcagttagttgaaagcggcggtggtgtggtgcaaccgggtcgtagcttacgtttatcttgcgcggcctctggctttacctttagcagctatgcgatgcattgggtgcgtcaggcgccaggtaagggcttagagtgggtggcggttatctcttatgacggtagcaacaagtactacgccgatagcgttaaaggccgcttcacgattagccgcgacaacagcaaaaataccttatacttacagatgaattctttacgcgccgaggatacggccgtttattattgtgcccgtaaccgcggtacgggtgacttagattattggggtcaatggggccaaggcaccctggttacggttagcagcggcggctcttctcgctcttctagctctggtggcggcggctctggcggcggtggcgaaattgttctgacccaaagcccggcgaccctgagcctgagcccaggtgaacgcgccaccctgagctgtcgtgcctctcaaagcgtttcttctagctacctggcctggtatcaacagaaaccaggtcaggccccgcgcttactgatttatggtgcgtcttctcgcgcgacgggtatcccagcgcgtttttctggcagcggctctggcaccgatttcacgctgaccatttctcgcctggaaccagaggactttgccgtttattactgccaagtgtgggattctagctctgaccacctggtggtgttcggtcaaggtaccaaggtggaaattaaa

SEQ ID NO: 66 - DNA, 756 bp, synthetic construct
  source 1..756: mol_type = other DNA
caggtgcagttagttgaaagcggcggtggtgtggtgcaaccgggtcgtagcttacgtttatcttgcgcggcctctggctttacctttagcagctatgcgatgcattgggtgcgtcaggcgccaggtaagggcttagagtgggtggcggttatctcttatgacggtagcaacaagtactacgccgatagcgttaaaggccgcttcacgattagccgcgacaacagcaaaaataccttatacttacagatgaattctttacgcgccgaggatacggccgtttattattgtgcccgtaactctggtcaaggtgacttaaatccgtggggtcaatggggccaaggcaccctggttacggttagcagcggcggctcttctcgctcttctagctctggtggcggcggctctggcggcggtggcgaaattgttctgacccaaagcccggcgaccctgagcctgagcccaggtgaacgcgccaccctgagctgtcgtgcctctcaaagcgtttcttctagctacctggcctggtatcaacagaaaccaggtcaggccccgcgcttactgatttatggtgcgtcttctcgcgcgacgggtatcccagcgcgtttttctggcagcggctctggcaccgatttcacgctgaccatttctcgcctggaaccagaggactttgccgtttattactgcggtacctgggattctagcttattatctagcagcctggttgttttcggtcagggtaccaaagtggagatcaaa

SEQ ID NO: 67 - DNA, 750 bp, synthetic construct
  source 1..750: mol_type = other DNA
caggtgcagttagttgaaagcggcggtggtgtggtgcaaccgggtcgtagcttacgtttatcttgcgcggcctctggctttacctttagcagctatgcgatgcattgggtgcgtcaggcgccaggtaagggcttagagtgggtggcggttatctcttatgacggtagcaacaagtactacgccgatagcgttaaaggccgcttcacgattagccgcgacaacagcaaaaataccttatacttacagatgaattctttacgcgccgaggatacggccgtttattattgtgcccgtaactctggtcaaggtgacttaaatccgtggggtcaatggggccaaggcaccctggttacggttagcagcggcggctcttctcgctcttctagctctggtggcggcggctctggcggcggtggcgaaattgttctgacccaaagcccggcgaccctgagcctgagcccaggtgaacgcgccaccctgagctgtcgtgcctctcaaagcgtttcttctagctacctggcctggtatcaacagaaaccaggtcaggccccgcgcttactgatttatggtgcgtcttctcgcgcgacgggtatcccagcgcgtttttctggcagcggctctggcaccgatttcacgctgaccatttctcgcctggaaccagaggactttgccgtttattactgccaagcgtgggatacgagcacgtcttctcatgtggtgttcggtcaaggtaccaaggtggaaattaaa

SEQ ID NO: 68 - DNA, 750 bp, synthetic construct
  source 1..750: mol_type = other DNA
caggtgcagttagttgaaagcggcggtggtgtggtgcaaccgggtcgtagcttacgtttatcttgcgcggcctctggctttacctttagcagctatgcgatgcattgggtgcgtcaggcgccaggtaagggcttagagtgggtggcggttatctcttatgacggtagcaacaagtactacgccgatagcgttaaaggccgcttcacgattagccgcgacaacagcaaaaataccttatacttacagatgaattctttacgcgccgaggatacggccgtttattattgtgcccgtaactctggtcaaggtgacttaaatccgtggggtcaatggggccaaggcaccctggttacggttagcagcggcggctcttctcgctcttctagctctggtggcggcggctctggcggcggtggcgaaattgttctgacccaaagcccggcgaccctgagcctgagcccaggtgaacgcgccaccctgagctgtcgtgcctctcaaagcgtttcttctagctacctggcctggtatcaacagaaaccaggtcaggccccgcgcttactgatttatggtgcgtcttctcgcgcgacgggtatcccagcgcgtttttctggcagcggctctggcaccgatttcacgctgaccatttctcgcctggaaccagaggactttgccgtttattactgccaagtgtgggattctagcgcctctccacatgtggtgttcggtcaaggtaccaaggtggaaattaaa

SEQ ID NO: 69 - DNA, 750 bp, synthetic construct
  source 1..750: mol_type = other DNA
caggtgcagttagttgaaagcggcggtggtgtggtgcaaccgggtcgtagcttacgtttatcttgcgcggcctctggctttacctttagcagctatgcgatgcattgggtgcgtcaggcgccaggtaagggcttagagtgggtggcggttatctcttatgacggtagcaacaagtactacgccgatagcgttaaaggccgcttcacgattagccgcgacaacagcaaaaataccttatacttacagatgaattctttacgcgccgaggatacggccgtttattattgtgcccgtaactctggtcaaggtgacttaaatccgtggggtcaatggggccaaggcaccctggttacggttagcagcggcggctcttctcgctcttctagctctggtggcggcggctctggcggcggtggcgaaattgttctgacccaaagcccggcgaccctgagcctgagcccaggtgaacgcgccaccctgagctgtcgtgcctctcaaagcgtttcttctagctacctggcctggtatcaacagaaaccaggtcaggccccgcgcttactgatttatggtgcgtcttctcgcgcgacgggtatcccagcgcgtttttctggcagcggctctggcaccgatttcacgctgaccatttctcgcctggaaccagaggactttgccgtttattactgccaagtgtgggattctagctctgacggtctggtggtgttcggtcaaggtaccaaggtggaaattaaa

SEQ ID NO: 70 - DNA, 750 bp, synthetic construct
  source 1..750: mol_type = other DNA
caggtgcagttagttgaaagcggcggtggtgtggtgcaaccgggtcgtagcttacgtttatcttgcgcggcctctggctttacctttagcagctatgcgatgcattgggtgcgtcaggcgccaggtaagggcttagagtgggtggcggttatctcttatgacggtagcaacaagtactacgccgatagcgttaaaggccgcttcacgattagccgcgacaacagcaaaaataccttatacttacagatgaattctttacgcgccgaggatacggccgtttattattgtgcccgtaactctggtcaaggtgagttaaaaccgtggggtcaatggggccaaggcaccctggttacggttagcagcggcggctcttctcgctcttctagctctggtggcggcggctctggcggcggtggcgaaattgttctgacccaaagcccggcgaccctgagcctgagcccaggtgaacgcgccaccctgagctgtcgtgcctctcaaagcgtttcttctagctacctggcctggtatcaacagaaaccaggtcaggccccgcgcttactgatttatggtgcgtcttctcgcgcgacgggtatcccagcgcgtttttctggcagcggctctggcaccgatttcacgctgaccatttctcgcctggaaccagaggactttgccgtttattactgccaagtgtgggatacgagcggtaaccacccggtggtgttcggtcaaggtaccaaggtggaaattaaa

SEQ ID NO: 71 - DNA, 750 bp, synthetic construct
  source 1..750: mol_type = other DNA
caggtgcagttagttgaaagcggcggtggtgtggtgcaaccgggtcgtagcttacgtttatcttgcgcggcctctggctttacctttagcagctatgcgatgcattgggtgcgtcaggcgccaggtaagggcttagagtgggtggcggttatctcttatgacggtagcaacaagtactacgccgatagcgttaaaggccgcttcacgattagccgcgacaacagcaaaaataccttatacttacagatgaattctttacgcgccgaggatacggccgtttattattgtgcccgtaactctggtcaaggtgagttaaatccgtggggtcaatggggccaaggcaccctggttacggttagcagcggcggctcttctcgctcttctagctctggtggcggcggctctggcggcggtggcgaaattgttctgacccaaagcccggcgaccctgagcctgagcccaggtgaacgcgccaccctgagctgtcgtgcctctcaaagcgtttcttctagctacctggcctggtatcaacagaaaccaggtcaggccccgcgcttactgatttatggtgcgtcttctcgcgcgacgggtatcccagcgcgtttttctggcagcggctctggcaccgatttcacgctgaccatttctcgcctggaaccagaggactttgccgtttattactgccaagtgtgggatgccagctctgacccatttgtggtgttcggtcaaggtaccaaggtggaaattaaa

SEQ ID NO: 72 - DNA, 750 bp, synthetic construct
  source 1..750: mol_type = other DNA
caggtgcagttagttgaaagcggcggtggtgtggtgcaaccgggtcgtagcttacgtttatcttgcgcggcctctggctttacctttagcagctatgcgatgcattgggtgcgtcaggcgccaggtaagggcttagagtgggtggcggttatctcttatgacggtagcaacaagtactacgccgatagcgttaaaggccgcttcacgattagccgcgacaacagcaaaaataccttatacttacagatgaattctttacgcgccgaggatacggccgtttattattgtgcccgtaactctggtcaaggtgagttaaatccgtggggtcaatggggccaaggcaccctggttacggttagcagcggcggctcttctcgctcttctagctctggtggcggcggctctggcggcggtggcgaaattgttctgacccaaagcccggcgaccctgagcctgagcccaggtgaacgcgccaccctgagctgtcgtgcctctcaaagcgtttcttctagctacctggcctggtatcaacagaaaccaggtcaggccccgcgcttactgatttatggtgcgtcttctcgcgcgacgggtatcccagcgcgtttttctggcagcggctctggcaccgatttcacgctgaccatttctcgcctggaaccagaggactttgccgtttattactgccaagtgtgggattctagctctgaccaccatgtggtgttcggtcaaggtaccaaggtggaaattaaa

SEQ ID NO: 73 - DNA, 747 bp, synthetic construct
  source 1..747: mol_type = other DNA
caggtgcagttagttgaaagcggcggtggtgtggtgcaaccgggtcgtagcttacgtttatcttgcgcggcctctggctttacctttagcagctatgcgatgcattgggtgcgtcaggcgccaggtaagggcttagagtgggtggcggttatctcttatgacggtagcaacaagtactacgccgatagcgttaaaggccgcttcacgattagccgcgacaacagcaaaaataccttatacttacagatgaattctttacgcgccgaggatacggccgtttattattgtgcccgtaactctggtcaaggtgagttaaatccgtggggtcaatggggccaaggcaccctggttacggttagcagcggcggctcttctcgctcttctagctctggtggcggcggctctggcggcggtggcgaaattgttctgacccaaagcccggcgaccctgagcctgagcccaggtgaacgcgccaccctgagctgtcgtgcctctcaaagcgtttcttctagctacctggcctggtatcaacagaaaccaggtcaggccccgcgcttactgatttatggtgcgtcttctcgcgcgacgggtatcccagcgcgtttttctggcagcggctctggcaccgatttcacgctgaccatttctcgcctggaaccagaggactttgccgtttattactgccaagtgtgggattctagctctccagttgtggtgtttggtcaaggtacgaaagttgaaattaaa

SEQ ID NO: 74 - DNA, 735 bp, synthetic construct
  source 1..735: mol_type = other DNA
caggtgcagttagttgaaagcggcggtggtgtggtgcaaccgggtcgtagcttacgtttatcttgcgcggcctctggctttacctttagcagctatgcgatgcattgggtgcgtcaggcgccaggtaagggcttagagtgggtggcggttatctcttatgacggtagcaacaagtactacgccgatagcgttaaaggccgcttcacgattagccgcgacaacagcaaaaataccttatacttacagatgaattctttacgcgccgaggatacggccgtttattattgtgcccgtaactggaacgacttcgactactggggtcagtggggccaaggtaccttagtgaccgtgtcttctggtggcagcagccgttcttcttcttctggtggcggtggtagcggcggcggtggcgaaatcgtgctgacccaaagcccggccaccctgagcctgagcccgggcgaacgcgccaccttatcttgccgtgcgtctcagtctgtttctagctcttacttagcgtggtaccagcaaaaaccaggccaggccccacgtttactgatctacggcgcgagctctcgtgccacgggtattccagcccgcttcagcggcagcggtagcggcaccgactttaccctgacgatcagccgtctggagccagaagatttcgccgtttattactgtcagcgctatgagagcagcccacgtacgttcggtcagggcaccaaggttgagatcaaa

SEQ ID NO: 75 - DNA, 756 bp, synthetic construct
  source 1..756: mol_type = other DNA
caggtgcagttagttgaaagcggcggtggtgtggtgcaaccgggtcgtagcttacgtttatcttgcgcggcctctggctttacctttagcagctatgcgatgcattgggtgcgtcaggcgccaggtaagggcttagagtgggtggcggttatctcttatgacggtagcaacaagtactacgccgatagcgttaaaggccgcttcacgattagccgcgacaacagcaaaaataccttatacttacagatgaattctttacgcgccgaggatacggccgtttattattgtgcccgtccattaccaaacgttggttacggcatggatgtttggggtcagtggggtcagggcaccttagttacggtgagcagcggcggttcttctcgctctagctcttctggcggcggcggtagcggcggtggcggcgaaatcgtgctgacgcagagcccggcgaccctgagcctgtctccaggcgagcgcgcgaccctgtcttgccgcgcctctcagtctgtttctagctcttatttagcgtggtaccagcagaagccaggccaagcgccacgcctgctgatttacggcgcctcttctcgtgccacgggtatcccggcgcgtttcagcggcagcggtagcggcaccgacttcaccctgaccatctctcgtctggagccagaggatttcgccgtgtactattgtggcacctgggacagctctttattactgagctatgttttcggtcaaggcacgaaagtggaaatcaaa

SEQ ID NO: 76 - DNA, 750 bp, synthetic construct
  source 1..750: mol_type = other DNA
caggtgcagttagttgaaagcggcggtggtgtggtgcaaccgggtcgtagcttacgtttatcttgcgcggcctctggctttacctttagcagctatgcgatgcattgggtgcgtcaggcgccaggtaagggcttagagtgggtggcggttatctcttatgacggtagcaacaagtactacgccgatagcgttaaaggccgcttcacgattagccgcgacaacagcaaaaataccttatacttacagatgaattctttacgcgccgaggatacggccgtttattattgtgcccgtcaaggttggttagccacgacgcgcggcatggatttatggggtcagtggggtcagggcaccttagttacggtgagcagcggcggttcttctcgctctagctcttctggcggcggcggtagcggcggtggcggcgaaatcgtgctgacgcagagcccggcgaccctgagcctgtctccaggcgagcgcgcgaccctgtcttgccgcgcctctcagtctgtttctagctcttatttagcgtggtaccagcagaagccaggccaagcgccacgcctgctgatttacggcgcctcttctcgtgccacgggtatcccggcgcgtttcagcggcagcggtagcggcaccgacttcaccctgaccatctctcgtctggagccagaggatttcgccgtgtactattgtcaggcgggtgatcgcacgacgggccagtttggtcaaggtacgaaagttgaaattaaa

SEQ ID NO: 77 - DNA, 741 bp, synthetic construct
  source 1..741: mol_type = other DNA
caggtgcagttagttgaaagcggcggtggtgtggtgcaaccgggtcgtagcttacgtttatcttgcgcggcctctggctttacctttagcagctatgcgatgcattgggtgcgtcaggcgccaggtaagggcttagagtgggtggcggttatctcttatgacggtagcaacaagtactacgccgatagcgttaaaggccgcttcacgattagccgcgacaacagcaaaaataccttatacttacagatgaattctttacgcgccgaggatacggccgtttattattgtgcccgtcaaaagttacgcggtgacggttttgatacgtggggtcagtggggtcagggcaccttagttacggtgagcagcggcggttcttctcgctctagctcttctggcggcggcggtagcggcggtggcggcgaaatcgtgctgacgcagagcccggcgaccctgagcctgtctccaggcgagcgcgcgaccctgtcttgccgcgcctctcagtctgtttctagctcttatttagcgtggtaccagcagaagccaggccaagcgccacgcctgctgatttacggcgcctcttctcgtgccacgggtatcccggcgcgtttcagcggcagcggtagcggcaccgacttcaccctgaccatctctcgtctggagccagaggatttcgccgtgtactattgtcagcattacggcggtccattcacctttggccaaggtacgaaggtggagattaaa

SEQ ID NO: 78 - DNA, 744 bp, synthetic construct
  source 1..744: mol_type = other DNA
caggtgcagttagttgaaagcggcggtggtgtggtgcaaccgggtcgtagcttacgtttatcttgcgcggcctctggctttacctttagcagctatgcgatgcattgggtgcgtcaggcgccaggtaagggcttagagtgggtggcggttatctcttatgacggtagcaacaagtactacgccgatagcgttaaaggccgcttcacgattagccgcgacaacagcaaaaataccttatacttacagatgaattctttacgcgccgaggatacggccgtttattattgtgcccgttctggtaactcttacggtcaatttgattactggggtcagtggggtcagggcaccttagttacggtgagcagcggcggttcttctcgctctagctcttctggcggcggcggtagcggcggtggcggcgaaatcgtgctgacgcagagcccggcgaccctgagcctgtctccaggcgagcgcgcgaccctgtcttgccgcgcctctcagtctgtttctagctcttatttagcgtggtaccagcagaagccaggccaagcgccacgcctgctgatttacggcgcctcttctcgtgccacgggtatcccggcgcgtttcagcggcagcggtagcggcaccgacttcaccctgaccatctctcgtctggagccagaggatttcgccgtgtactattgtcagacctggggtaccggtcacgttgtgtttggccaaggtacgaaggtggagattaaa

SEQ ID NO: 79 - DNA, 744 bp, synthetic construct
  source 1..744: mol_type = other DNA
caggtgcagttagttgaaagcggcggtggtgtggtgcaaccgggtcgtagcttacgtttatcttgcgcggcctctggctttacctttagcagctatgcgatgcattgggtgcgtcaggcgccaggtaagggcttagagtgggtggcggttatctcttatgacggtagcaacaagtactacgccgatagcgttaaaggccgcttcacgattagccgcgacaacagcaaaaataccttatacttacagatgaattctttacgcgccgaggatacggccgtttattattgtgcccgttctggtcaatacggtggttactttgattactggggtcagtggggtcagggcaccttagttacggtgagcagcggcggttcttctcgctctagctcttctggcggcggcggtagcggcggtggcggcgaaatcgtgctgacgcagagcccggcgaccctgagcctgtctccaggcgagcgcgcgaccctgtcttgccgcgcctctcagtctgtttctagctcttatttagcgtggtaccagcagaagccaggccaagcgccacgcctgctgatttacggcgcctcttctcgtgccacgggtatcccggcgcgtttcagcggcagcggtagcggcaccgacttcaccctgaccatctctcgtctggagccagaggatttcgccgtgtactattgtcagcaggagtattctttcccagtgacctttggtcaaggtacgaaagttgaaattaaa

SEQ ID NO: 80 - DNA, 738 bp, synthetic construct
  source 1..738: mol_type = other DNA
caggtgcagttagttgaaagcggcggtggtgtggtgcaaccgggtcgtagcttacgtttatcttgcgcggcctctggctttacctttagcagctatgcgatgcattgggtgcgtcaggcgccaggtaagggcttagagtgggtggcggttatctcttatgacggtagcaacaagtactacgccgatagcgttaaaggccgcttcacgattagccgcgacaacagcaaaaataccttatacttacagatgaattctttacgcgccgaggatacggccgtttattattgtgcccgtacggccgcctacgttttaggtcattggggccaatggggtcagggtaccctggtgacggtttctagcggcggcagctctcgctcttcttctagcggtggtggcggcagcggtggcggcggtgaaattgtgttaacccagtctccggcgaccctgagcctgagcccgggtgagcgtgccacgctgagctgccgcgcgtctcaatctgtgtcttcttcttatttagcgtggtaccagcaaaaaccgggtcaagcgccacgtttattaatttatggcgccagctctcgcgccaccggtatcccagcccgttttagcggtagcggcagcggtaccgattttacgttaaccattagccgcttagaaccggaggacttcgcggtttactattgtcagcaaagctattctattccattcacgtttggccagggtacgaaggttgaaatcaaa

SEQ ID NO: 81 - DNA, 738 bp, synthetic construct
  source 1..738: mol_type = other DNA
caggtgcagttagttgaaagcggcggtggtgtggtgcaaccgggtcgtagcttacgtttatcttgcgcggcctctggctttacctttagcagctatgcgatgcattgggtgcgtcaggcgccaggtaagggcttagagtgggtggcggttatctcttatgacggtagcaacaagtactacgccgatagcgttaaaggccgcttcacgattagccgcgacaacagcaaaaataccttatacttacagatgaattctttacgcgccgaggatacggccgtttattattgtgcccgtacggccgcctacgttttaggtcattggggccaatggggtcagggtaccctggtgacggtttctagcggcggcagctctcgctcttcttctagcggtggtggcggcagcggtggcggcggtgaaattgtgttaacccagtctccggcgaccctgagcctgagcccgggtgagcgtgccacgctgagctgccgcgcgtctcaatctgtgtcttcttcttatttagcgtggtaccagcaaaaaccgggtcaagcgccacgtttattaatttatggcgccagctctcgcgccaccggtatcccagcccgttttagcggtagcggcagcggtaccgattttacgttaaccattagccgcttagaaccggaggacttcgcggtttactattgtcagcaaagctattctattccattaacgtttggccagggtacgaaggttgaaatcaaa

SEQ ID NO: 82 - DNA, 750 bp, synthetic construct
  source 1..750: mol_type = other DNA
caggtgcagttagttgaaagcggcggtggtgtggtgcaaccgggtcgtagcttacgtttatcttgcgcggcctctggctttacctttagcagctatgcgatgcattgggtgcgtcaggcgccaggtaagggcttagagtgggtggcggttatctcttatgacggtagcaacaagtactacgccgatagcgttaaaggccgcttcacgattagccgcgacaacagcaaaaataccttatacttacagatgaattctttacgcgccgaggatacggccgtttattattgtgcccgtacgcgcatcggttactctcaccatgcggactactggggccaatggggccagggcacgttagttaccgtgagcagcggtggttcttctcgcagctcttctagcggcggcggtggcagcggtggcggcggcgagattgtgttaacccagagcccggcgaccctgagcttatctccgggtgagcgtgcgaccttaagctgtcgcgccagccaatctgttagctctagctacctggcctggtatcagcaaaagccgggtcaggccccacgtctgctgatctatggtgcctctagccgcgccacgggtattccggcgcgctttagcggctctggcagcggcacggactttaccctgacgatcagccgtttagagccagaagacttcgcggtttattactgctattcttatgttggttctagcacctgggtgttcggtcaaggtaccaaggtggaaattaaa

SEQ ID NO: 83 - DNA, 747 bp, synthetic construct
  source 1..747: mol_type = other DNA
caggtgcagttagttgaaagcggcggtggtgtggtgcaaccgggtcgtagcttacgtttatcttgcgcggcctctggctttacctttagcagctatgcgatgcattgggtgcgtcaggcgccaggtaagggcttagagtgggtggcggttatctcttatgacggtagcaacaagtactacgccgatagcgttaaaggccgcttcacgattagccgcgacaacagcaaaaataccttatacttacagatgaattctttacgcgccgaggatacggccgtttattattgtgcccgtacggttggtgccgccgccttcgatatttggggtcaatggggccaaggcaccctggttacggttagcagcggcggctcttctcgctcttctagctctggtggcggcggctctggcggcggtggcgaaattgttctgacccaaagcccggcgaccctgagcctgagcccaggtgaacgcgccaccctgagctgtcgtgcctctcaaagcgtttcttctagctacctggcctggtatcaacagaaaccaggtcaggccccgcgcttactgatttatggtgcgtcttctcgcgcgacgggtatcccagcgcgtttttctggcagcggctctggcaccgatttcacgctgaccatttctcgcctggaaccagaggactttgccgtttattactgcggtaccctggacagcatcttacgcagctgggtgtttggtcaaggtacgaaagttgaaattaaa

SEQ ID NO: 84 - DNA, 750 bp, synthetic construct
  source 1..750: mol_type = other DNA
caggtgcagttagttgaaagcggcggtggtgtggtgcaaccgggtcgtagcttacgtttatcttgcgcggcctctggctttacctttagcagctatgcgatgcattgggtgcgtcaggcgccaggtaagggcttagagtgggtggcggttatctcttatgacggtagcaacaagtactacgccgatagcgttaaaggccgcttcacgattagccgcgacaacagcaaaaataccttatacttacagatgaattctttacgcgccgaggatacggccgtttattattgtgcccgtacggttggtccatacggtcgcacctatttcgactattggggtcagtggggccagggtacgttagtgaccgtgagctctggtggttcttctcgttcttctagcagcggcggtggcggctctggcggcggcggtgaaattgttctgacccagagcccggcgaccctgtctttaagcccaggtgaacgtgcgacgctgtcttgtcgcgcgtctcaatctgtgtctagctcttatttagcgtggtatcaacaaaaaccaggccaagccccgcgtctgttaatttacggtgccagctctcgcgccacgggcattccggcccgttttagcggtagcggcagcggtacggattttaccttaacgattagccgcttagagccggaggactttgccgtgtactattgccaacaggccatctcttttccgctgacgttcggtcaaggcacgaaagtggaaatcaaa

SEQ ID NO: 85 - DNA, 750 bp, synthetic construct
  source 1..750: mol_type = other DNA
caggtgcagttagttgaaagcggcggtggtgtggtgcaaccgggtcgtagcttacgtttatcttgcgcggcctctggctttacctttagcagctatgcgatgcattgggtgcgtcaggcgccaggtaagggcttagagtgggtggcggttatctcttatgacggtagcaacaagtactacgccgatagcgttaaaggccgcttcacgattagccgcgacaacagcaaaaataccttatacttacagatgaattctttacgcgccgaggatacggccgtttattattgtgcccgtacggttggtccatacggtcgcacctatttcgactattggggtcagtggggccagggtacgttagtgaccgtgagctctggtggttcttctcgttcttctagcagcggcggtggcggctctggcggcggcggtgaaattgttctgacccagagcccggcgaccctgtctttaagcccaggtgaacgtgcgacgctgtcttgtcgcgcgtctcaatctgtgtctagctcttatttagcgtggtatcaacaaaaaccaggccaagccccgcgtctgttaatttacggtgccagctctcgcgccacgggcattccggcccgttttagcggtagcggcagcggtacggattttaccttaacgattagccgcttagagccggaggactttgccgtgtactattgccaacaggccaactcttttccgattacgttcggtcaaggcacgaaagtggaaatcaaa

SEQ ID NO: 86 - DNA, 750 bp, synthetic construct
  source 1..750: mol_type = other DNA
caggtgcagttagttgaaagcggcggtggtgtggtgcaaccgggtcgtagcttacgtttatcttgcgcggcctctggctttacctttagcagctatgcgatgcattgggtgcgtcaggcgccaggtaagggcttagagtgggtggcggttatctcttatgacggtagcaacaagtactacgccgatagcgttaaaggccgcttcacgattagccgcgacaacagcaaaaataccttatacttacagatgaattctttacgcgccgaggatacggccgtttattattgtgcccgtacggttggtccatacggtcgcacctatttcgactattggggtcagtggggccagggtacgttagtgaccgtgagctctggtggttcttctcgttcttctagcagcggcggtggcggctctggcggcggcggtgaaattgttctgacccagagcccggcgaccctgtctttaagcccaggtgaacgtgcgacgctgtcttgtcgcgcgtctcaatctgtgtctagctcttatttagcgtggtatcaacaaaaaccaggccaagccccgcgtctgttaatttacggtgccagctctcgcgccacgggcattccggcccgttttagcggtagcggcagcggtacggattttaccttaacgattagccgcttagagccggaggactttgccgtgtactattgccaacaggccaactcttttccgctgacgttcggtcaaggcacgaaagtggaaatcaaa

SEQ ID NO: 87 - DNA, 750 bp, synthetic construct
  source 1..750: mol_type = other DNA
caggtgcagttagttgaaagcggcggtggtgtggtgcaaccgggtcgtagcttacgtttatcttgcgcggcctctggctttacctttagcagctatgcgatgcattgggtgcgtcaggcgccaggtaagggcttagagtgggtggcggttatctcttatgacggtagcaacaagtactacgccgatagcgttaaaggccgcttcacgattagccgcgacaacagcaaaaataccttatacttacagatgaattctttacgcgccgaggatacggccgtttattattgtgcccgtacggttggtccatacggtcgcacctatttcgactattggggtcagtggggccagggtacgttagtgaccgtgagctctggtggttcttctcgttcttctagcagcggcggtggcggctctggcggcggcggtgaaattgttctgacccagagcccggcgaccctgtctttaagcccaggtgaacgtgcgacgctgtcttgtcgcgcgtctcaatctgtgtctagctcttatttagcgtggtatcaacaaaaaccaggccaagccccgcgtctgttaatttacggtgccagctctcgcgccacgggcattccggcccgttttagcggtagcggcagcggtacggattttaccttaacgattagccgcttagagccggaggactttgccgtgtactattgccaacaggccaactcttttccgccgacgttcggtcaaggcacgaaagtggaaatcaaa

SEQ ID NO: 88 - DNA, 750 bp, synthetic construct
  source 1..750: mol_type = other DNA
caggtgcagttagttgaaagcggcggtggtgtggtgcaaccgggtcgtagcttacgtttatcttgcgcggcctctggctttacctttagcagctatgcgatgcattgggtgcgtcaggcgccaggtaagggcttagagtgggtggcggttatctcttatgacggtagcaacaagtactacgccgatagcgttaaaggccgcttcacgattagccgcgacaacagcaaaaataccttatacttacagatgaattctttacgcgccgaggatacggccgtttattattgtgcccgtacggttggtccatacggtcgcacctatttcgactattggggtcagtggggccagggtacgttagtgaccgtgagctctggtggttcttctcgttcttctagcagcggcggtggcggctctggcggcggcggtgaaattgttctgacccagagcccggcgaccctgtctttaagcccaggtgaacgtgcgacgctgtcttgtcgcgcgtctcaatctgtgtctagctcttatttagcgtggtatcaacaaaaaccaggccaagccccgcgtctgttaatttacggtgccagctctcgcgccacgggcattccggcccgttttagcggtagcggcagcggtacggattttaccttaacgattagccgcttagagccggaggactttgccgtgtactattgccaacaggcctactcttttccgccgacgttcggtcaaggcacgaaagtggaaatcaaa

SEQ ID NO: 89 - DNA, 750 bp, synthetic construct
  source 1..750: mol_type = other DNA
caggtgcagttagttgaaagcggcggtggtgtggtgcaaccgggtcgtagcttacgtttatcttgcgcggcctctggctttacctttagcagctatgcgatgcattgggtgcgtcaggcgccaggtaagggcttagagtgggtggcggttatctcttatgacggtagcaacaagtactacgccgatagcgttaaaggccgcttcacgattagccgcgacaacagcaaaaataccttatacttacagatgaattctttacgcgccgaggatacggccgtttattattgtgcccgtacggttggtccatacggtcgcacctatttcgactattggggtcagtggggccagggtacgttagtgaccgtgagctctggtggttcttctcgttcttctagcagcggcggtggcggctctggcggcggcggtgaaattgttctgacccagagcccggcgaccctgtctttaagcccaggtgaacgtgcgacgctgtcttgtcgcgcgtctcaatctgtgtctagctcttatttagcgtggtatcaacaaaaaccaggccaagccccgcgtctgttaatttacggtgccagctctcgcgccacgggcattccggcccgttttagcggtagcggcagcggtacggattttaccttaacgattagccgcttagagccggaggactttgccgtgtactattgccaacagggtatcaactggccgctgaccttcggtcaaggtaccaaggtggaaattaaa

SEQ ID NO: 90 - DNA, 747 bp, synthetic construct
  source 1..747: mol_type = other DNA
caggtgcagttagttgaaagcggcggtggtgtggtgcaaccgggtcgtagcttacgtttatcttgcgcggcctctggctttacctttagcagctatgcgatgcattgggtgcgtcaggcgccaggtaagggcttagagtgggtggcggttatctcttatgacggtagcaacaagtactacgccgatagcgttaaaggccgcttcacgattagccgcgacaacagcaaaaataccttatacttacagatgaattctttacgcgccgaggatacggccgtttattattgtgcccgtacggttggtccatacggtcgcacctatttcgactattggggtcagtggggccagggtacgttagtgaccgtgagctctggtggttcttctcgttcttctagcagcggcggtggcggctctggcggcggcggtgaaattgttctgacccagagcccggcgaccctgtctttaagcccaggtgaacgtgcgacgctgtcttgtcgcgcgtctcaatctgtgtctagctcttatttagcgtggtatcaacaaaaaccaggccaagccccgcgtctgttaatttacggtgccagctctcgcgccacgggcattccggcccgttttagcggtagcggcagcggtacggattttaccttaacgattagccgcttagagccggaggactttgccgtgtactattgccaaacctggggttctggtattgtgtttggtcaaggtacgaaagttgaaattaaa

SEQ ID NO: 91 - DNA, 762 bp, synthetic construct
  source 1..762: mol_type = other DNA
caggtgcagttagttgaaagcggcggtggtgtggtgcaaccgggtcgtagcttacgtttatcttgcgcggcctctggctttacctttagcagctatgcgatgcattgggtgcgtcaggcgccaggtaagggcttagagtgggtggcggttatctcttatgacggtagcaacaagtactacgccgatagcgttaaaggccgcttcacgattagccgcgacaacagcaaaaataccttatacttacagatgaattctttacgcgccgaggatacggccgtttattattgtgcccgttggaacatcgccatcgttggtgccgcgccggttccagtgatggacgtgtggggccagtggggtcaaggtaccctggtgaccgtttcttctggtggtagctctcgcagcagcagctctggcggcggtggcagcggcggtggcggcgagattgtgctgacccagagcccggcgacgttaagcttatctccgggcgaacgcgcgacgttatcttgccgcgcctctcagtctgtgtctagctcttatctggcctggtaccagcaaaaaccaggtcaggcgccgcgcctgttaatctacggcgcctcttctcgcgcgaccggcatcccggcgcgtttcagcggcagcggttctggcaccgatttcacgctgaccatctctcgcctggagccagaagactttgccgtgtattactgccaacaagccaatagctttccattaacgttcggccaaggcaccaaagttgagatcaaa

SEQ ID NO: 92 - DNA, 762 bp, synthetic construct
  source 1..762: mol_type = other DNA
caggtgcagttagttgaaagcggcggtggtgtggtgcaaccgggtcgtagcttacgtttatcttgcgcggcctctggctttacctttagcagctatgcgatgcattgggtgcgtcaggcgccaggtaagggcttagagtgggtggcggttatctcttatgacggtagcaacaagtactacgccgatagcgttaaaggccgcttcacgattagccgcgacaacagcaaaaataccttatacttacagatgaattctttacgcgccgaggatacggccgtttattattgtgcccgttggaacatcgccatcgttggtgccgcgccggttccagtgatggacgtgtggggccagtggggtcaaggtaccctggtgaccgtttcttctggtggtagctctcgcagcagcagctctggcggcggtggcagcggcggtggcggcgagattgtgctgacccagagcccggcgacgttaagcttatctccgggcgaacgcgcgacgttatcttgccgcgcctctcagtctgtgtctagctcttatctggcctggtaccagcaaaaaccaggtcaggcgccgcgcctgttaatctacggcgcctcttctcgcgcgaccggcatcccggcgcgtttcagcggcagcggttctggcaccgatttcacgctgaccatctctcgcctggagccagaagactttgccgtgtattactgccaacaagccaatagctttccagtttctttcggccaaggcaccaaagttgagatcaaa

SEQ ID NO: 93 - DNA, 762 bp, synthetic construct
  source 1..762: mol_type = other DNA
caggtgcagttagttgaaagcggcggtggtgtggtgcaaccgggtcgtagcttacgtttatcttgcgcggcctctggctttacctttagcagctatgcgatgcattgggtgcgtcaggcgccaggtaagggcttagagtgggtggcggttatctcttatgacggtagcaacaagtactacgccgatagcgttaaaggccgcttcacgattagccgcgacaacagcaaaaataccttatacttacagatgaattctttacgcgccgaggatacggccgtttattattgtgcccgttggaacatcgccatcgttggtgccgcgccggttccagtgatggacgtgtggggccagtggggtcaaggtaccctggtgaccgtttcttctggtggtagctctcgcagcagcagctctggcggcggtggcagcggcggtggcggcgagattgtgctgacccagagcccggcgacgttaagcttatctccgggcgaacgcgcgacgttatcttgccgcgcctctcagtctgtgtctagctcttatctggcctggtaccagcaaaaaccaggtcaggcgccgcgcctgttaatctacggcgcctcttctcgcgcgaccggcatcccggcgcgtttcagcggcagcggttctggcaccgatttcacgctgaccatctctcgcctggagccagaagactttgccgtgtattactgccaacaagccaatagctttccagttacgttcggccaaggcaccaaagttgagatcaaa

SEQ ID NO: 94 - DNA, 744 bp, synthetic construct
  source 1..744: mol_type = other DNA
caggtgcagttagttgaaagcggcggtggtgtggtgcaaccgggtcgtagcttacgtttatcttgcgcggcctctggctttacctttagcagctatgcgatgcattgggtgcgtcaggcgccaggtaagggcttagagtgggtggcggttatctcttatgacggtagcaacaagtactacgccgatagcgttaaaggccgcttcacgattagccgcgacaacagcaaaaataccttatacttacagatgaattctttacgcgccgaggatacggccgtttattattgtgcccgttacggttctaactaccgctactttgatcgctggggtcagtggggtcagggcaccttagttacggtgagcagcggcggttcttctcgctctagctcttctggcggcggcggtagcggcggtggcggcgaaatcgtgctgacgcagagcccggcgaccctgagcctgtctccaggcgagcgcgcgaccctgtcttgccgcgcctctcagtctgtttctagctcttatttagcgtggtaccagcagaagccaggccaagcgccacgcctgctgatttacggcgcctcttctcgtgccacgggtatcccggcgcgtttcagcggcagcggtagcggcaccgacttcaccctgaccatctctcgtctggagccagaggatttcgccgtgtactattgtatgcagggctctcattggccatgggccttcggccagggcacgaaggttgagattaaa

SEQ ID NO: 95 - DNA, 744 bp, synthetic construct
  source 1..744: mol_type = other DNA
caggtgcagttagttgaaagcggcggtggtgtggtgcaaccgggtcgtagcttacgtttatcttgcgcggcctctggctttacctttagcagctatgcgatgcattgggtgcgtcaggcgccaggtaagggcttagagtgggtggcggttatctcttatgacggtagcaacaagtactacgccgatagcgttaaaggccgcttcacgattagccgcgacaacagcaaaaataccttatacttacagatgaattctttacgcgccgaggatacggccgtttattattgtgccagcgccggtccagacgacgacttcgattattggggtcaatggggccaaggcaccctggttacggttagcagcggcggctcttctcgctcttctagctctggtggcggcggctctggcggcggtggcgaaattgttctgacccaaagcccggcgaccctgagcctgagcccaggtgaacgcgccaccctgagctgtcgtgcctctcaaagcgtttcttctagctacctggcctggtatcaacagaaaccaggtcaggccccgcgcttactgatttatggtgcgtcttctcgcgcgacgggtatcccagcgcgtttttctggcagcggctctggcaccgatttcacgctgaccatttctcgcctggaaccagaggactttgccgtttattactgccaagcgtgggattctagcacgggtgttgtgtttggccaaggtacgaaggtggagattaaa

SEQ ID NO: 96 - DNA, 738 bp, synthetic construct
  source 1..738: mol_type = other DNA
caggtgcagttagttgaaagcggcggtggtgtggtgcaaccgggtcgtagcttacgtttatcttgcgcggcctctggctttacctttagcagctatgcgatgcattgggtgcgtcaggcgccaggtaagggcttagagtgggtggcggttatctcttatgacggtagcaacaagtactacgccgatagcgttaaaggccgcttcacgattagccgcgacaacagcaaaaataccttatacttacagatgaattctttacgcgccgaggatacggccgtttattattgtgccagcgccggtccagacgacgacttcgattattggggtcaatggggccaaggcaccctggttacggttagcagcggcggctcttctcgctcttctagctctggtggcggcggctctggcggcggtggcgaaattgttctgacccaaagcccggcgaccctgagcctgagcccaggtgaacgcgccaccctgagctgtcgtgcctctcaaagcgtttcttctagctacctggcctggtatcaacagaaaccaggtcaggccccgcgcttactgatttatggtgcgtcttctcgcgcgacgggtatcccagcgcgtttttctggcagcggctctggcaccgatttcacgctgaccatttctcgcctggaaccagaggactttgccgtttattactgccaagtgtgggattctagcacggttttcggccagggcacgaaggttgagattaaa

SEQ ID NO: 97 - DNA, 744 bp, synthetic construct
  source 1..744: mol_type = other DNA
caggtgcagttagttgaaagcggcggtggtgtggtgcaaccgggtcgtagcttacgtttatcttgcgcggcctctggctttacctttagcagctatgcgatgcattgggtgcgtcaggcgccaggtaagggcttagagtgggtggcggttatctcttatgacggtagcaacaagtactacgccgatagcgttaaaggccgcttcacgattagccgcgacaacagcaaaaataccttatacttacagatgaattctttacgcgccgaggatacggccgtttattattgtgccagcccaaagtacggtgacttctactttgattactggggtcagtggggtcagggcaccttagttacggtgagcagcggcggttcttctcgctctagctcttctggcggcggcggtagcggcggtggcggcgaaatcgtgctgacgcagagcccggcgaccctgagcctgtctccaggcgagcgcgcgaccctgtcttgccgcgcctctcagtctgtttctagctcttatttagcgtggtaccagcagaagccaggccaagcgccacgcctgctgatttacggcgcctcttctcgtgccacgggtatcccggcgcgtttcagcggcagcggtagcggcaccgacttcaccctgaccatctctcgtctggagccagaggatttcgccgtgtactattgtcagcagcactatgccatcccactgacctttggtcaaggtacgaaagttgaaattaaa

SEQ ID NO: 98 - DNA, 738 bp, synthetic construct
  source 1..738: mol_type = other DNA
caggtgcagttagttgaaagcggcggtggtgtggtgcaaccgggtcgtagcttacgtttatcttgcgcggcctctggctttacctttagcagctatgcgatgcattgggtgcgtcaggcgccaggtaagggcttagagtgggtggcggttatctcttatgacggtagcaacaagtactacgccgatagcgttaaaggccgcttcacgattagccgcgacaacagcaaaaataccttatacttacagatgaattctttacgcgccgaggatacggccgtttattattgtgccaccaacgactggtggggtcactggggtcaatggggtcagggcacgttagtgacggtgagcagcggtggttctagccgtagcagctcttctggtggtggtggctctggtggcggcggcgagattgtgttaacccagagcccagcgaccttaagcctgagcccgggcgaacgtgcgacgttaagctgtcgcgcgagccagtctgtgtcttcttcttatttagcctggtaccagcaaaaaccaggccaagcgccgcgcttactgatctatggtgccagcagccgtgccaccggtatcccagcgcgcttctctggtagcggcagcggtaccgattttacgctgaccatttctcgcctggaaccggaggactttgcggtttactactgccaagtttgggattctcagtctaatagctgggtttttggtcaaggtaccaaagtggagatcaaa

SEQ ID NO: 99 - DNA, 741 bp, synthetic construct
  source 1..741: mol_type = other DNA
caggtgcagttagttgaaagcggcggtggtgtggtgcaaccgggtcgtagcttacgtttatcttgcgcggcctctggctttacctttagcagctatgcgatgcattgggtgcgtcaggcgccaggtaagggcttagagtgggtggcggttatctcttatgacggtagcaacaagtactacgccgatagcgttaaaggccgcttcacgattagccgcgacaacagcaaaaataccttatacttacagatgaattctttacgcgccgaggatacggccgtttattattgtgccacctacgacgttttaacgggtttcgaatattggggtcaatggggccaaggcaccctggttacggttagcagcggcggctcttctcgctcttctagctctggtggcggcggctctggcggcggtggcgaaattgttctgacccaaagcccggcgaccctgagcctgagcccaggtgaacgcgccaccctgagctgtcgtgcctctcaaagcgtttcttctagctacctggcctggtatcaacagaaaccaggtcaggccccgcgcttactgatttatggtgcgtcttctcgcgcgacgggtatcccagcgcgtttttctggcagcggctctggcaccgatttcacgctgaccatttctcgcctggaaccagaggactttgccgtttattactgccaaacctggggcacgggcatccgcgtttttggccagggtacgaaggttgaaatcaaa

SEQ ID NO: 100 - DNA, 747 bp, synthetic construct
  source 1..747: mol_type = other DNA
caggtgcagttagttgaaagcggcggtggtgtggtgcaaccgggtcgtagcttacgtttatcttgcgcggcctctggctttacctttagcagctatgcgatgcattgggtgcgtcaggcgccaggtaagggcttagagtgggtggcggttatctcttatgacggtagcaacaagtactacgccgatagcgttaaaggccgcttcacgattagccgcgacaacagcaaaaataccttatacttacagatgaattctttacgcgccgaggatacggccgtttattattgtgccacctacttaggtggtatcgttggtgcgagcgactactggggccaatggggccagggcacgttagttaccgtgagcagcggtggttcttctcgcagctcttctagcggcggcggtggcagcggtggcggcggcgagattgtgttaacccagagcccggcgaccctgagcttatctccgggtgagcgtgcgaccttaagctgtcgcgccagccaatctgttagctctagctacctggcctggtatcagcaaaagccgggtcaggccccacgtctgctgatctatggtgcctctagccgcgccacgggtattccggcgcgctttagcggctctggcagcggcacggactttaccctgacgatcagccgtttagagccagaagacttcgcggtttattactgccagcaagaatacacggccccggtgaccttcggtcaaggtaccaaggtggaaattaaa

SEQ ID NO: 101 - DNA, 741 bp, synthetic construct
  source 1..741: mol_type = other DNA
caggtgcagttagttgaaagcggcggtggtgtggtgcaaccgggtcgtagcttacgtttatcttgcgcggcctctggctttacctttagcagctatgcgatgcattgggtgcgtcaggcgccaggtaagggcttagagtgggtggcggttatctcttatgacggtagcaacaagtactacgccgatagcgttaaaggccgcttcacgattagccgcgacaacagcaaaaataccttatacttacagatgaattctttacgcgccgaggatacggccgtttattattgttctggcggtgagttagcccgcggtttcgatccgtggggtcaatggggccaaggcaccctggttacggttagcagcggcggctcttctcgctcttctagctctggtggcggcggctctggcggcggtggcgaaattgttctgacccaaagcccggcgaccctgagcctgagcccaggtgaacgcgccaccctgagctgtcgtgcctctcaaagcgtttcttctagctacctggcctggtatcaacagaaaccaggtcaggccccgcgcttactgatttatggtgcgtcttctcgcgcgacgggtatcccagcgcgtttttctggcagcggctctggcaccgatttcacgctgaccatttctcgcctggaaccagaggactttgccgtttattactgccaacagagcgttaccatcccacgcacctttggccaaggtacgaaggtggagattaaa

SEQ ID NO: 102 - DNA, 750 bp, synthetic construct
  source 1..750: mol_type = other DNA
caggtgcagttagttgaaagcggcggtggtgtggtgcaaccgggtcgtagcttacgtttatcttgcgcggcctctggctttacctttagcagctatgcgatgcattgggtgcgtcaggcgccaggtaagggcttagagtgggtggcggttatctcttatgacggtagcaacaagtactacgccgatagcgttaaaggccgcttcacgattagccgcgacaacagcaaaaataccttatacttacagatgaattctttacgcgccgaggatacggccgtttattattgtgttcgtcactctggttggttattcccatctgcgtttgacgtttggggccaatggggccagggcacgttagttaccgtgagcagcggtggttcttctcgcagctcttctagcggcggcggtggcagcggtggcggcggcgagattgtgttaacccagagcccggcgaccctgagcttatctccgggtgagcgtgcgaccttaagctgtcgcgccagccaatctgttagctctagctacctggcctggtatcagcaaaagccgggtcaggccccacgtctgctgatctatggtgcctctagccgcgccacgggtattccggcgcgctttagcggctctggcagcggcacggactttaccctgacgatcagccgtttagagccagaagacttcgcggtttattactgccagaactggggcacgggtgttggcggctttggtcaaggtacgaaagttgaaattaaa

SEQ ID NO: 103 - DNA, 753 bp, synthetic construct; identical to SEQ ID NO: 1
  source 1..753: mol_type = other DNA

SEQ ID NO: 104 - DNA, 729 bp, synthetic construct; identical to SEQ ID NO: 2
  source 1..729: mol_type = other DNA

SEQ ID NO: 105 - DNA, 735 bp, synthetic construct; identical to SEQ ID NO: 3
  source 1..735: mol_type = other DNA

SEQ ID NO: 106 - DNA, 762 bp, synthetic construct; identical to SEQ ID NO: 4
  source 1..762: mol_type = other DNA

SEQ ID NO: 107 - DNA, 747 bp, synthetic construct; identical to SEQ ID NO: 5
  source 1..747: mol_type = other DNA

SEQ ID NO: 108 - DNA, 744 bp, synthetic construct; identical to SEQ ID NO: 6
  source 1..744: mol_type = other DNA

SEQ ID NO: 109 - DNA, 762 bp, synthetic construct; identical to SEQ ID NO: 7
  source 1..762: mol_type = other DNA

SEQ ID NO: 110 - DNA, 744 bp, synthetic construct; identical to SEQ ID NO: 8
  source 1..744: mol_type = other DNA

SEQ ID NO: 111 - DNA, 756 bp, synthetic construct; identical to SEQ ID NO: 9
  source 1..756: mol_type = other DNA

SEQ ID NO: 112 - DNA, 756 bp, synthetic construct; identical to SEQ ID NO: 10
  source 1..756: mol_type = other DNA

SEQ ID NO: 113 - DNA, 756 bp, synthetic construct; identical to SEQ ID NO: 11
  source 1..756: mol_type = other DNA

SEQ ID NO: 114 - DNA, 756 bp, synthetic construct; identical to SEQ ID NO: 12
  source 1..756: mol_type = other DNA

SEQ ID NO: 115 - DNA, 756 bp, synthetic construct; identical to SEQ ID NO: 13
  source 1..756: mol_type = other DNA

SEQ ID NO: 116 - DNA, 756 bp, synthetic construct; identical to SEQ ID NO: 14
  source 1..756: mol_type = other DNA

SEQ ID NO: 117 - DNA, 756 bp, synthetic construct; identical to SEQ ID NO: 15
  source 1..756: mol_type = other DNA

SEQ ID NO: 118 - DNA, 741 bp, synthetic construct; identical to SEQ ID NO: 16
  source 1..741: mol_type = other DNA

SEQ ID NO: 119 - DNA, 741 bp, synthetic construct; identical to SEQ ID NO: 17
  source 1..741: mol_type = other DNA

SEQ ID NO: 120 - DNA, 741 bp, synthetic construct; identical to SEQ ID NO: 18
  source 1..741: mol_type = other DNA

SEQ ID NO: 121 - DNA, 741 bp, synthetic construct; identical to SEQ ID NO: 19
  source 1..741: mol_type = other DNA

SEQ ID NO: 122 - DNA, 750 bp, synthetic construct; identical to SEQ ID NO: 20
  source 1..750: mol_type = other DNA

SEQ ID NO: 123 - DNA, 741 bp, synthetic construct; identical to SEQ ID NO: 21
  source 1..741: mol_type = other DNA

SEQ ID NO: 124 - DNA, 744 bp, synthetic construct; identical to SEQ ID NO: 22
  source 1..744: mol_type = other DNA

SEQ ID NO: 125 - DNA, 750 bp, synthetic construct; identical to SEQ ID NO: 23
  source 1..750: mol_type = other DNA

SEQ ID NO: 126 - DNA, 741 bp, synthetic construct; identical to SEQ ID NO: 24
  source 1..741: mol_type = other DNA

SEQ ID NO: 127 - DNA, 744 bp, synthetic construct; identical to SEQ ID NO: 26
  source 1..744: mol_type = other DNA

SEQ ID NO: 128 - DNA, 744 bp, synthetic construct; identical to SEQ ID NO: 27
  source 1..744: mol_type = other DNA

SEQ ID NO: 129 - DNA, 744 bp, synthetic construct; identical to SEQ ID NO: 28
  source 1..744: mol_type = other DNA

SEQ ID NO: 130 - DNA, 738 bp, synthetic construct; identical to SEQ ID NO: 29
  source 1..738: mol_type = other DNA

SEQ ID NO: 131 - DNA, 771 bp, synthetic construct; identical to SEQ ID NO: 31
  source 1..771: mol_type = other DNA

SEQ ID NO: 132 - DNA, 774 bp, synthetic construct; identical to SEQ ID NO: 32
  source 1..774: mol_type = other DNA

SEQ ID NO: 133 - DNA, 771 bp, synthetic construct; identical to SEQ ID NO: 33
  source 1..771: mol_type = other DNA

SEQ ID NO: 134 - DNA, 777 bp, synthetic construct; identical to SEQ ID NO: 34
  source 1..777: mol_type = other DNA

SEQ ID NO: 135 - DNA, 780 bp, synthetic construct; identical to SEQ ID NO: 35
  source 1..780: mol_type = other DNA

SEQ ID NO: 136 - DNA, 771 bp, synthetic construct; identical to SEQ ID NO: 36
  source 1..771: mol_type = other DNA

SEQ ID NO: 137 - DNA, 747 bp, synthetic construct; identical to SEQ ID NO: 37
  source 1..747: mol_type = other DNA

SEQ ID NO: 138 - DNA, 747 bp, synthetic construct; identical to SEQ ID NO: 38
  source 1..747: mol_type = other DNA

SEQ ID NO: 139 - DNA, 753 bp, synthetic construct; identical to SEQ ID NO: 39
  source 1..753: mol_type = other DNA

SEQ ID NO: 140 - DNA, 753 bp, synthetic construct; identical to SEQ ID NO: 40
  source 1..753: mol_type = other DNA

SEQ ID NO: 141 - DNA, 747 bp, synthetic construct; identical to SEQ ID NO: 41
  source 1..747: mol_type = other DNA

SEQ ID NO: 142 - DNA, 756 bp, synthetic construct; identical to SEQ ID NO: 42
  source 1..756: mol_type = other DNA

SEQ ID NO: 143 - DNA, 741 bp, synthetic construct; identical to SEQ ID NO: 43
  source 1..741: mol_type = other DNA

SEQ ID NO: 144 - DNA, 750 bp, synthetic construct; identical to SEQ ID NO: 44
  source 1..750: mol_type = other DNA

SEQ ID NO: 145 - DNA, 741 bp, synthetic construct; identical to SEQ ID NO: 45
  source 1..741: mol_type = other DNA

SEQ ID NO: 146 - DNA, 747 bp, synthetic construct; identical to SEQ ID NO: 47
  source 1..747: mol_type = other DNA

SEQ ID NO: 147 - DNA, 747 bp, synthetic construct; identical to SEQ ID NO: 48
  source 1..747: mol_type = other DNA

SEQ ID NO: 148 - DNA, 750 bp, synthetic construct; identical to SEQ ID NO: 49
  source 1..750: mol_type = other DNA

SEQ ID NO: 149 - DNA, 768 bp, synthetic construct; identical to SEQ ID NO: 50
  source 1..768: mol_type = other DNA

SEQ ID NO: 150 - DNA, 768 bp, synthetic construct; identical to SEQ ID NO: 51
  source 1..768: mol_type = other DNA

SEQ ID NO: 151 - DNA, 762 bp, synthetic construct; identical to SEQ ID NO: 52
  source 1..762: mol_type = other DNA

SEQ ID NO: 152 - DNA, 750 bp, synthetic construct; identical to SEQ ID NO: 53
  source 1..750: mol_type = other DNA

SEQ ID NO: 153 - DNA, 741 bp, synthetic construct; identical to SEQ ID NO: 54
  source 1..741: mol_type = other DNA

SEQ ID NO: 154 - DNA, 771 bp, synthetic construct; identical to SEQ ID NO: 55
  source 1..771: mol_type = other DNA

SEQ ID NO: 155 - DNA, 747 bp, synthetic construct; identical to SEQ ID NO: 56
  source 1..747: mol_type = other DNA

SEQ ID NO: 156 - DNA, 756 bp, synthetic construct; identical to SEQ ID NO: 57
  source 1..756: mol_type = other DNA

SEQ ID NO: 157 - DNA, 765 bp, synthetic construct; identical to SEQ ID NO: 58
  source 1..765: mol_type = other DNA

SEQ ID NO: 158 - DNA, 741 bp, synthetic construct; identical to SEQ ID NO: 59
  source 1..741: mol_type = other DNA

SEQ ID NO: 159 - DNA, 738 bp, synthetic construct; identical to SEQ ID NO: 60
  source 1..738: mol_type = other DNA

SEQ ID NO: 160 - DNA, 738 bp, synthetic construct; identical to SEQ ID NO: 61
  source 1..738: mol_type = other DNA

SEQ ID NO: 161 - DNA, 738 bp, synthetic construct; identical to SEQ ID NO: 62
  source 1..738: mol_type = other DNA

SEQ ID NO: 162 - DNA, 738 bp, synthetic construct; identical to SEQ ID NO: 63
  source 1..738: mol_type = other DNA

SEQ ID NO: 163 - DNA, 750 bp, synthetic construct; identical to SEQ ID NO: 64
  source 1..750: mol_type = other DNA

SEQ ID NO: 164 - DNA, 750 bp, synthetic construct; identical to SEQ ID NO: 65
  source 1..750: mol_type = other DNA

SEQ ID NO: 165 - DNA, 756 bp, synthetic construct; identical to SEQ ID NO: 66
  source 1..756: mol_type = other DNA

SEQ ID NO: 166 - DNA, 750 bp, synthetic construct; identical to SEQ ID NO: 67
  source 1..750: mol_type = other DNA

SEQ ID NO: 167 - DNA, 750 bp, synthetic construct; identical to SEQ ID NO: 68
  source 1..750: mol_type = other DNA

SEQ ID NO: 168 - DNA, 750 bp, synthetic construct; identical to SEQ ID NO: 69
  source 1..750: mol_type = other DNA

SEQ ID NO: 169 - DNA, 750 bp, synthetic construct; identical to SEQ ID NO: 70
  source 1..750: mol_type = other DNA

SEQ ID NO: 170 - DNA, 750 bp, synthetic construct; identical to SEQ ID NO: 71
  source 1..750: mol_type = other DNA

SEQ ID NO: 171 - DNA, 750 bp, synthetic construct; identical to SEQ ID NO: 72
  source 1..750: mol_type = other DNA

SEQ ID NO: 172 - DNA, 747 bp, synthetic construct; identical to SEQ ID NO: 73
  source 1..747: mol_type = other DNA

SEQ ID NO: 173 - DNA, 735 bp, synthetic construct; identical to SEQ ID NO: 74
  source 1..735: mol_type = other DNA

SEQ ID NO: 174 - DNA, 756 bp, synthetic construct; identical to SEQ ID NO: 75
  source 1..756: mol_type = other DNA

SEQ ID NO: 175 - DNA, 750 bp, synthetic construct; identical to SEQ ID NO: 76
  source 1..750: mol_type = other DNA

SEQ ID NO: 176 - DNA, 741 bp, synthetic construct; identical to SEQ ID NO: 77
  source 1..741: mol_type = other DNA

SEQ ID NO: 177 - DNA, 744 bp, synthetic construct; identical to SEQ ID NO: 79
  source 1..744: mol_type = other DNA

SEQ ID NO: 178 - DNA, 738 bp, synthetic construct; identical to SEQ ID NO: 80
  source 1..738: mol_type = other DNA

SEQ ID NO: 179 - DNA, 738 bp, synthetic construct; identical to SEQ ID NO: 81
  source 1..738: mol_type = other DNA

SEQ ID NO: 180 - DNA, 750 bp, synthetic construct; identical to SEQ ID NO: 82
  source 1..750: mol_type = other DNA

SEQ ID NO: 181 - DNA, 750 bp, synthetic construct; identical to SEQ ID NO: 84
  source 1..750: mol_type = other DNA

SEQ ID NO: 182 - DNA, 750 bp, synthetic construct; identical to SEQ ID NO: 85
  source 1..750: mol_type = other DNA

SEQ ID NO: 183 - DNA, 750 bp, synthetic construct; identical to SEQ ID NO: 86
  source 1..750: mol_type = other DNA

SEQ ID NO: 184 - DNA, 750 bp, synthetic construct; identical to SEQ ID NO: 87
  source 1..750: mol_type = other DNA

SEQ ID NO: 185 - DNA, 750 bp, synthetic construct; identical to SEQ ID NO: 88
  source 1..750: mol_type = other DNA

SEQ ID NO: 186 - DNA, 750 bp, synthetic construct; identical to SEQ ID NO: 89
  source 1..750: mol_type = other DNA

SEQ ID NO: 187 - DNA, 747 bp, synthetic construct; identical to SEQ ID NO: 90
  source 1..747: mol_type = other DNA

SEQ ID NO: 188 - DNA, 762 bp, synthetic construct; identical to SEQ ID NO: 91
  source 1..762: mol_type = other DNA

SEQ ID NO: 189 - DNA, 762 bp, synthetic construct; identical to SEQ ID NO: 92
  source 1..762: mol_type = other DNA

SEQ ID NO: 190 - DNA, 762 bp, synthetic construct; identical to SEQ ID NO: 93
  source 1..762: mol_type = other DNA

SEQ ID NO: 191 - DNA, 744 bp, synthetic construct; identical to SEQ ID NO: 94
  source 1..744: mol_type = other DNA

SEQ ID NO: 192 - DNA, 744 bp, synthetic construct; identical to SEQ ID NO: 95
  source 1..744: mol_type = other DNA

SEQ ID NO: 193 - DNA, 738 bp, synthetic construct; identical to SEQ ID NO: 96
  source 1..738: mol_type = other DNA

SEQ ID NO: 194 - DNA, 744 bp, synthetic construct; identical to SEQ ID NO: 97
  source 1..744: mol_type = other DNA

SEQ ID NO: 195 - DNA, 738 bp, synthetic construct; identical to SEQ ID NO: 98
  source 1..738: mol_type = other DNA

SEQ ID NO: 196 - DNA, 747 bp, synthetic construct; identical to SEQ ID NO: 100
  source 1..747: mol_type = other DNA

SEQ ID NO: 197 - DNA, 750 bp, synthetic construct; identical to SEQ ID NO: 102
  source 1..750: mol_type = other DNA

SEQ ID NO: 198 - DNA, 759 bp, synthetic construct
  source 1..759: mol_type = other DNA
caggtgcagttagttgaaagcggcggtggtgtggtgcaaccgggtcgtagcttacgtttatcttgcgcggcctctggctttacctttagcagctatgcgatgcattgggtgcgtcaggcgccaggtaagggcttagagtgggtggcggttatctcttatgacggtagcaacaagtactacgccgatagcgttaaaggccgcttcacgattagccgcgacaacagcaaaaataccttatacttacagatgaattctttacgcgccgaggatacggccgtttattattgtgccgcggccaagaacggtgcctctttaggcgtgaacttatggggccaatggggccagggcacgttagttaccgtgagcagcggtggttcttctcgcagctcttctagcggcggcggtggcagcggtggcggcggcgagattgtgttaacccagagcccggcgaccctgagcttatctccgggtgagcgtgcgaccttaagctgtcgcgccagccaatctgttagctctagctacctggcctggtatcagcaaaagccgggtcaggccccacgtctgctgatctatggtgcctctagccgcgccacgggtattccggcgcgctttagcggctctggcagcggcacggactttaccctgacgatcagccgtttagagccagaagacttcgcggtttattactgccagtcttatgactcttctctgagcggctctccagttgtttttggtcagggcaccaaggttgagattaaa

SEQ ID NO: 199 - DNA, 735 bp, synthetic construct
  source 1..735: mol_type = other DNA
caggtgcagttagttgaaagcggcggtggtgtggtgcaaccgggtcgtagcttacgtttatcttgcgcggcctctggctttacctttagcagctatgcgatgcattgggtgcgtcaggcgccaggtaagggcttagagtgggtggcggttatctcttatgacggtagcaacaagtactacgccgatagcgttaaaggccgcttcacgattagccgcgacaacagcaaaaataccttatacttacagatgaattctttacgcgccgaggatacggccgtttattattgtgccgatttacaatacgactactggggtcaatggggccagggtacgctggttaccgtgagctctggtggtagcagccgtagctcttcttctggtggtggcggttctggcggcggcggtgaaattgttctgacccagtctccggcgacgctgagcctgagcccgggcgaacgtgccacgctgtcttgtcgtgcgagccaaagcgtttcttctagctacttagcctggtatcaacagaagccgggtcaggcgccacgcctgttaatttacggtgcgagcagccgcgcgacgggtatcccggcccgcttctctggcagcggctctggcaccgatttcaccctgaccatctctcgtctggaaccagaggattttgccgtttactattgtgccgcgtgggacaattctctgagcgccgtggttttcggtcagggcaccaaggttgagatcaaa

SEQ ID NO: 200 - DNA, 735 bp, synthetic construct
  source 1..735: mol_type = other DNA
caggtgcagttagttgaaagcggcggtggtgtggtgcaaccgggtcgtagcttacgtttatcttgcgcggcctctggctttacctttagcagctatgcgatgcattgggtgcgtcaggcgccaggtaagggcttagagtgggtggcggttatctcttatgacggtagcaacaagtactacgccgatagcgttaaaggccgcttcacgattagccgcgacaacagcaaaaataccttatacttacagatgaattctttacgcgccgaggatacggccgtttattattgtgccgatttacaatacgactactggggtcaatggggccagggtacgctggttaccgtgagctctggtggtagcagccgtagctcttcttctggtggtggcggttctggcggcggcggtgaaattgttctgacccagtctccggcgacgctgagcctgagcccgggcgaacgtgccacgctgtcttgtcgtgcgagccaaagcgtttcttctagctacttagcctggtatcaacagaagccgggtcaggcgccacgcctgttaatttacggtgcgagcagccgcgcgacgggtatcccggcccgcttctctggcagcggctctggcaccgatttcaccctgaccatctctcgtctggaaccagaggattttgccgtttactattgtttaagctgggacagctctctgagcgccgaagttttcggtcagggcaccaaggttgagatcaaa

SEQ ID NO: 201 - DNA, 732 bp, synthetic construct
  source 1..732: mol_type = other DNA
caggtgcagttagttgaaagcggcggtggtgtggtgcaaccgggtcgtagcttacgtttatcttgcgcggcctctggctttacctttagcagctatgcgatgcattgggtgcgtcaggcgccaggtaagggcttagagtgggtggcggttatctcttatgacggtagcaacaagtactacgccgatagcgttaaaggccgcttcacgattagccgcgacaacagcaaaaataccttatacttacagatgaattctttacgcgccgaggatacggccgtttattattgtgccgatttacaatacgactactggggtcaatggggccagggtacgctggttaccgtgagctctggtggtagcagccgtagctcttcttctggtggtggcggttctggcggcggcggtgaaattgttctgacccagtctccggcgacgctgagcctgagcccgggcgaacgtgccacgctgtcttgtcgtgcgagccaaagcgtttcttctagctacttagcctggtatcaacagaagccgggtcaggcgccacgcctgttaatttacggtgcgagcagccgcgcgacgggtatcccggcccgcttctctggcagcggctctggcaccgatttcaccctgaccatctctcgtctggaaccagaggattttgccgtttactattgtcaagcgtgggacagctctacccgtggtgtgttcggtcaaggcaccaaagttgagatcaaa

SEQ ID NO: 202 - DNA, 729 bp, synthetic construct
  source 1..729: mol_type = other DNA
caggtgcagttagttgaaagcggcggtggtgtggtgcaaccgggtcgtagcttacgtttatcttgcgcggcctctggctttacctttagcagctatgcgatgcattgggtgcgtcaggcgccaggtaagggcttagagtgggtggcggttatctcttatgacggtagcaacaagtactacgccgatagcgttaaaggccgcttcacgattagccgcgacaacagcaaaaataccttatacttacagatgaattctttacgcgccgaggatacggccgtttattattgtgccgatttacaatacgactactggggtcaatggggccagggtacgctggttaccgtgagctctggtggtagcagccgtagctcttcttctggtggtggcggttctggcggcggcggtgaaattgttctgacccagtctccggcgacgctgagcctgagcccgggcgaacgtgccacgctgtcttgtcgtgcgagccaaagcgtttcttctagctacttagcctggtatcaacagaagccgggtcaggcgccacgcctgttaatttacggtgcgagcagccgcgcgacgggtatcccggcccgcttctctggcagcggctctggcaccgatttcaccctgaccatctctcgtctggaaccagaggattttgccgtttactattgtcaacagtactattctgtgccgtggacgtttggtcaaggtaccaaagtggagatcaaa

SEQ ID NO: 203 - DNA, 732 bp, synthetic construct
  source 1..732: mol_type = other DNA
caggtgcagttagttgaaagcggcggtggtgtggtgcaaccgggtcgtagcttacgtttatcttgcgcggcctctggctttacctttagcagctatgcgatgcattgggtgcgtcaggcgccaggtaagggcttagagtgggtggcggttatctcttatgacggtagcaacaagtactacgccgatagcgttaaaggccgcttcacgattagccgcgacaacagcaaaaataccttatacttacagatgaattctttacgcgccgaggatacggccgtttattattgtgccgatttacaatacgactactggggtcaatggggccagggtacgctggttaccgtgagctctggtggtagcagccgtagctcttcttctggtggtggcggttctggcggcggcggtgaaattgttctgacccagtctccggcgacgctgagcctgagcccgggcgaacgtgccacgctgtcttgtcgtgcgagccaaagcgtttcttctagctacttagcctggtatcaacagaagccgggtcaggcgccacgcctgttaatttacggtgcgagcagccgcgcgacgggtatcccggcccgcttctctggcagcggctctggcaccgatttcaccctgaccatctctcgtctggaaccagaggattttgccgtttactattgtcaaagctgggacgcgggtaccaatcgcgtgttcggtcaaggcaccaaagttgagatcaaa

SEQ ID NO: 204 - DNA, 735 bp, synthetic construct
  source 1..735: mol_type = other DNA
caggtgcagttagttgaaagcggcggtggtgtggtgcaaccgggtcgtagcttacgtttatcttgcgcggcctctggctttacctttagcagctatgcgatgcattgggtgcgtcaggcgccaggtaagggcttagagtgggtggcggttatctcttatgacggtagcaacaagtactacgccgatagcgttaaaggccgcttcacgattagccgcgacaacagcaaaaataccttatacttacagatgaattctttacgcgccgaggatacggccgtttattattgtgccgatttacaatacgactactggggtcaatggggccagggtacgctggttaccgtgagctctggtggtagcagccgtagctcttcttctggtggtggcggttctggcggcggcggtgaaattgttctgacccagtctccggcgacgctgagcctgagcccgggcgaacgtgccacgctgtcttgtcgtgcgagccaaagcgtttcttctagctacttagcctggtatcaacagaagccgggtcaggcgccacgcctgttaatttacggtgcgagcagccgcgcgacgggtatcccggcccgcttctctggcagcggctctggcaccgatttcaccctgaccatctctcgtctggaaccagaggattttgccgtttactattgtcaagtgtgggacagctctagcgatcacccggttttcggtcagggcaccaaggttgagatcaaa

SEQ ID NO: 205 - DNA, 735 bp, synthetic construct
  source 1..735: mol_type = other DNA
caggtgcagttagttgaaagcggcggtggtgtggtgcaaccgggtcgtagcttacgtttatcttgcgcggcctctggctttacctttagcagctatgcgatgcattgggtgcgtcaggcgccaggtaagggcttagagtgggtggcggttatctcttatgacggtagcaacaagtactacgccgatagcgttaaaggccgcttcacgattagccgcgacaacagcaaaaataccttatacttacagatgaattctttacgcgccgaggatacggccgtttattattgtgccgataacggtccagactactggggtcaatggggccagggtacgctggttaccgtgagctctggtggtagcagccgtagctcttcttctggtggtggcggttctggcggcggcggtgaaattgttctgacccagtctccggcgacgctgagcctgagcccgggcgaacgtgccacgctgtcttgtcgtgcgagccaaagcgtttcttctagctacttagcctggtatcaacagaagccgggtcaggcgccacgcctgttaatttacggtgcgagcagccgcgcgacgggtatcccggcccgcttctctggcagcggctctggcaccgatttcaccctgaccatctctcgtctggaaccagaggattttgccgtttactattgtcaagtgtgggacagctctagcgatcactgggtgttcggtcaaggcaccaaagttgagatcaaa

SEQ ID NO: 206 - DNA, 741 bp, synthetic construct
  source 1..741: mol_type = other DNA
caggtgcagttagttgaaagcggcggtggtgtggtgcaaccgggtcgtagcttacgtttatcttgcgcggcctctggctttacctttagcagctatgcgatgcattgggtgcgtcaggcgccaggtaagggcttagagtgggtggcggttatctcttatgacggtagcaacaagtactacgccgatagcgttaaaggccgcttcacgattagccgcgacaacagcaaaaataccttatacttacagatgaattctttacgcgccgaggatacggccgtttattattgtgccgatacggcctactctttaccagttgatttttggggtcaatggggccaaggcaccctggttacggttagcagcggcggctcttctcgctcttctagctctggtggcggcggctctggcggcggtggcgaaattgttctgacccaaagcccggcgaccctgagcctgagcccaggtgaacgcgccaccctgagctgtcgtgcctctcaaagcgtttcttctagctacctggcctggtatcaacagaaaccaggtcaggccccgcgcttactgatttatggtgcgtcttctcgcgcgacgggtatcccagcgcgtttttctggcagcggctctggcaccgatttcacgctgaccatttctcgcctggaaccagaggactttgccgtttattactgccaacattatgacaattggccaccaacgtttggccagggtacgaaggttgaaatcaaa

SEQ ID NO: 207 - DNA, 747 bp, synthetic construct
  source 1..747: mol_type = other DNA
caggtgcagttagttgaaagcggcggtggtgtggtgcaaccgggtcgtagcttacgtttatcttgcgcggcctctggctttacctttagcagctatgcgatgcattgggtgcgtcaggcgccaggtaagggcttagagtgggtggcggttatctcttatgacggtagcaacaagtactacgccgatagcgttaaaggccgcttcacgattagccgcgacaacagcaaaaataccttatacttacagatgaattctttacgcgccgaggatacggccgtttattattgtgccggcgactcttcttcttctatgccatactttgattactggggtcagtggggtcagggcaccttagttacggtgagcagcggcggttcttctcgctctagctcttctggcggcggcggtagcggcggtggcggcgaaatcgtgctgacgcagagcccggcgaccctgagcctgtctccaggcgagcgcgcgaccctgtcttgccgcgcctctcagtctgtttctagctcttatttagcgtggtaccagcagaagccaggccaagcgccacgcctgctgatttacggcgcctcttctcgtgccacgggtatcccggcgcgtttcagcggcagcggtagcggcaccgacttcaccctgaccatctctcgtctggagccagaggatttcgccgtgtactattgtcagcaggacggcacgccaccacgtacctttggtcaaggtacgaaagttgaaattaaa

SEQ ID NO: 208 - DNA, 741 bp, synthetic construct
  source 1..741: mol_type = other DNA
caggtgcagttagttgaaagcggcggtggtgtggtgcaaccgggtcgtagcttacgtttatcttgcgcggcctctggctttacctttagcagctatgcgatgcattgggtgcgtcaggcgccaggtaagggcttagagtgggtggcggttatctcttatgacggtagcaacaagtactacgccgatagcgttaaaggccgcttcacgattagccgcgacaacagcaaaaataccttatacttacagatgaattctttacgcgccgaggatacggccgtttattattgtgccggcggtggtaactacggtcaattcgattattggggtcaatggggccaaggcaccctggttacggttagcagcggcggctcttctcgctcttctagctctggtggcggcggctctggcggcggtggcgaaattgttctgacccaaagcccggcgaccctgagcctgagcccaggtgaacgcgccaccctgagctgtcgtgcctctcaaagcgtttcttctagctacctggcctggtatcaacagaaaccaggtcaggccccgcgcttactgatttatggtgcgtcttctcgcgcgacgggtatcccagcgcgtttttctggcagcggctctggcaccgatttcacgctgaccatttctcgcctggaaccagaggactttgccgtttattactgccaacaggcggacagcccaccaatcacctttggccaaggtacgaaggtggagattaaa

SEQ ID NO: 209 - DNA, 741 bp, synthetic construct
  source 1..741: mol_type = other DNA
caggtgcagttagttgaaagcggcggtggtgtggtgcaaccgggtcgtagcttacgtttatcttgcgcggcctctggctttacctttagcagctatgcgatgcattgggtgcgtcaggcgccaggtaagggcttagagtgggtggcggttatctcttatgacggtagcaacaagtactacgccgatagcgttaaaggccgcttcacgattagccgcgacaacagcaaaaataccttatacttacagatgaattctttacgcgccgaggatacggccgtttattattgtgccggcggtggtaactacggtcaattcgattattggggtcaatggggccaaggcaccctggttacggttagcagcggcggctcttctcgctcttctagctctggtggcggcggctctggcggcggtggcgaaattgttctgacccaaagcccggcgaccctgagcctgagcccaggtgaacgcgccaccctgagctgtcgtgcctctcaaagcgtttcttctagctacctggcctggtatcaacagaaaccaggtcaggccccgcgcttactgatttatggtgcgtcttctcgcgcgacgggtatcccagcgcgtttttctggcagcggctctggcaccgatttcacgctgaccatttctcgcctggaaccagaggactttgccgtttattactgccaacaggcgaacagcccaccaatcacctttggccaaggtacgaaggtggagattaaa

SEQ ID NO: 210 - DNA, 741 bp, synthetic construct
  source 1..741: mol_type = other DNA
caggtgcagttagttgaaagcggcggtggtgtggtgcaaccgggtcgtagcttacgtttatcttgcgcggcctctggctttacctttagcagctatgcgatgcattgggtgcgtcaggcgccaggtaagggcttagagtgggtggcggttatctcttatgacggtagcaacaagtactacgccgatagcgttaaaggccgcttcacgattagccgcgacaacagcaaaaataccttatacttacagatgaattctttacgcgccgaggatacggccgtttattattgtgccggcggtggtaactacggtcaattcgattattggggtcaatggggccaaggcaccctggttacggttagcagcggcggctcttctcgctcttctagctctggtggcggcggctctggcggcggtggcgaaattgttctgacccaaagcccggcgaccctgagcctgagcccaggtgaacgcgccaccctgagctgtcgtgcctctcaaagcgtttcttctagctacctggcctggtatcaacagaaaccaggtcaggccccgcgcttactgatttatggtgcgtcttctcgcgcgacgggtatcccagcgcgtttttctggcagcggctctggcaccgatttcacgctgaccatttctcgcctggaaccagaggactttgccgtttattactgccaacagagctacagcccaccaatcacctttggccaaggtacgaaggtggagattaaa

SEQ ID NO: 211 - DNA, 735 bp, synthetic construct
  source 1..735: mol_type = other DNA
caggtgcagttagttgaaagcggcggtggtgtggtgcaaccgggtcgtagcttacgtttatcttgcgcggcctctggctttacctttagcagctatgcgatgcattgggtgcgtcaggcgccaggtaagggcttagagtgggtggcggttatctcttatgacggtagcaacaagtactacgccgatagcgttaaaggccgcttcacgattagccgcgacaacagcaaaaataccttatacttacagatgaattctttacgcgccgaggatacggccgtttattattgtgccggcgttggtcgcatcttcccatactggggccagtggggtcaaggcacgctggtgaccgtttcttctggcggcagcagccgctcttcttcttctggcggtggtggcagcggcggtggcggcgagattgtgctgacgcagagcccagcgaccctgagcctgagcccgggcgagcgcgcgacgttaagctgccgtgccagccaatctgttagctcttcttacctggcctggtatcaacagaagccgggccaagccccgcgcctgttaatctatggcgcgtctagccgcgccacgggcatcccagcccgctttagcggctctggcagcggcacggattttaccttaacgattagccgtttagagccggaagacttcgccgtgtactactgccaacagtcttatagcacgccgttcacgttcggccagggcacgaaggttgagattaaa

SEQ ID NO: 212 - DNA, 735 bp, synthetic construct
  source 1..735: mol_type = other DNA
caggtgcagttagttgaaagcggcggtggtgtggtgcaaccgggtcgtagcttacgtttatcttgcgcggcctctggctttacctttagcagctatgcgatgcattgggtgcgtcaggcgccaggtaagggcttagagtgggtggcggttatctcttatgacggtagcaacaagtactacgccgatagcgttaaaggccgcttcacgattagccgcgacaacagcaaaaataccttatacttacagatgaattctttacgcgccgaggatacggccgtttattattgtgccggcgttggtcgcatcttcccatactggggccagtggggtcaaggcacgctggtgaccgtttcttctggcggcagcagccgctcttcttcttctggcggtggtggcagcggcggtggcggcgagattgtgctgacgcagagcccagcgaccctgagcctgagcccgggcgagcgcgcgacgttaagctgccgtgccagccaatctgttagctcttcttacctggcctggtatcaacagaagccgggccaagccccgcgcctgttaatctatggcgcgtctagccgcgccacgggcatcccagcccgctttagcggctctggcagcggcacggattttaccttaacgattagccgtttagagccggaagacttcgccgtgtactactgccaacagacgtatatgaccccactgacgttcggtcagggcaccaaggttgagatcaaa

SEQ ID NO: 213 - DNA, 762 bp, synthetic construct
  source 1..762: mol_type = other DNA
caggtgcagttagttgaaagcggcggtggtgtggtgcaaccgggtcgtagcttacgtttatcttgcgcggcctctggctttacctttagcagctatgcgatgcattgggtgcgtcaggcgccaggtaagggcttagagtgggtggcggttatctcttatgacggtagcaacaagtactacgccgatagcgttaaaggccgcttcacgattagccgcgacaacagcaaaaataccttatacttacagatgaattctttacgcgccgaggatacggccgtttattattgtgcccatcgcttagccaactacacgcgcgtggatcgctactatgactattggggccagtggggtcaaggtaccctggtgaccgtttcttctggtggtagctctcgcagcagcagctctggcggcggtggcagcggcggtggcggcgagattgtgctgacccagagcccggcgacgttaagcttatctccgggcgaacgcgcgacgttatcttgccgcgcctctcagtctgtgtctagctcttatctggcctggtaccagcaaaaaccaggtcaggcgccgcgcctgttaatctacggcgcctcttctcgcgcgaccggcatcccggcgcgtttcagcggcagcggttctggcaccgatttcacgctgaccatctctcgcctggagccagaagactttgccgtgtattactgccaagtttggcacagcggcgataaccgctgggttttcggccaaggcaccaaagttgagatcaaa

SEQ ID NO: 214 - DNA, 750 bp, synthetic construct
  source 1..750: mol_type = other DNA
caggtgcagttagttgaaagcggcggtggtgtggtgcaaccgggtcgtagcttacgtttatcttgcgcggcctctggctttacctttagcagctatgcgatgcattgggtgcgtcaggcgccaggtaagggcttagagtgggtggcggttatctcttatgacggtagcaacaagtactacgccgatagcgttaaaggccgcttcacgattagccgcgacaacagcaaaaataccttatacttacagatgaattctttacgcgccgaggatacggccgtttattattgtgcccattctcgctctatctctccatactattttgactactggggccaatggggccagggcacgttagttaccgtgagcagcggtggttcttctcgcagctcttctagcggcggcggtggcagcggtggcggcggcgagattgtgttaacccagagcccggcgaccctgagcttatctccgggtgagcgtgcgaccttaagctgtcgcgccagccaatctgttagctctagctacctggcctggtatcagcaaaagccgggtcaggccccacgtctgctgatctatggtgcctctagccgcgccacgggtattccggcgcgctttagcggctctggcagcggcacggactttaccctgacgatcagccgtttagagccagaagacttcgcggtttattactgccagcaatataactcttactatagcggcgccttcggtcaaggcacgaaagtggaaatcaaa

SEQ ID NO: 215 - DNA, 738 bp, synthetic construct
  source 1..738: mol_type = other DNA
caggtgcagttagttgaaagcggcggtggtgtggtgcaaccgggtcgtagcttacgtttatcttgcgcggcctctggctttacctttagcagctatgcgatgcattgggtgcgtcaggcgccaggtaagggcttagagtgggtggcggttatctcttatgacggtagcaacaagtactacgccgatagcgttaaaggccgcttcacgattagccgcgacaacagcaaaaataccttatacttacagatgaattctttacgcgccgaggatacggccgtttattattgtgccaaagccttatacggtggtttagactattggggccaatggggtcagggtaccctggtgacggtttctagcggcggcagctctcgctcttcttctagcggtggtggcggcagcggtggcggcggtgaaattgtgttaacccagtctccggcgaccctgagcctgagcccgggtgagcgtgccacgctgagctgccgcgcgtctcaatctgtgtcttcttcttatttagcgtggtaccagcaaaaaccgggtcaagcgccacgtttattaatttatggcgccagctctcgcgccaccggtatcccagcccgttttagcggtagcggcagcggtaccgattttacgttaaccattagccgcttagaaccggaggacttcgcggtttactattgtcagcaaagctattctaccacgttcacgtttggccagggtacgaaggttgaaatcaaa

SEQ ID NO: 216 - DNA, 759 bp, synthetic construct
  source 1..759: mol_type = other DNA
caggtgcagttagttgaaagcggcggtggtgtggtgcaaccgggtcgtagcttacgtttatcttgcgcggcctctggctttacctttagcagctatgcgatgcattgggtgcgtcaggcgccaggtaagggcttagagtgggtggcggttatctcttatgacggtagcaacaagtactacgccgatagcgttaaaggccgcttcacgattagccgcgacaacagcaaaaataccttatacttacagatgaattctttacgcgccgaggatacggccgtttattattgtgccaaagccccattctggccacgctcttacacctatttcgactattggggtcagtggggccagggtacgttagtgaccgtgagctctggtggttcttctcgttcttctagcagcggcggtggcggctctggcggcggcggtgaaattgttctgacccagagcccggcgaccctgtctttaagcccaggtgaacgtgcgacgctgtcttgtcgcgcgtctcaatctgtgtctagctcttatttagcgtggtatcaacaaaaaccaggccaagccccgcgtctgttaatttacggtgccagctctcgcgccacgggcattccggcccgttttagcggtagcggcagcggtacggattttaccttaacgattagccgcttagagccggaggactttgccgtgtactattgccaagtgtgggactcttctcatcatagccgcgttttcggtcagggtaccaaagtggagatcaaa

SEQ ID NO: 217 - DNA, 750 bp, synthetic construct
  source 1..750: mol_type = other DNA
caggtgcagttagttgaaagcggcggtggtgtggtgcaaccgggtcgtagcttacgtttatcttgcgcggcctctggctttacctttagcagctatgcgatgcattgggtgcgtcaggcgccaggtaagggcttagagtgggtggcggttatctcttatgacggtagcaacaagtactacgccgatagcgttaaaggccgcttcacgattagccgcgacaacagcaaaaataccttatacttacagatgaattctttacgcgccgaggatacggccgtttattattgtgccaaagccgttgccttaggttgggccttcgatcgttggggtcaatggggccaaggcaccctggttacggttagcagcggcggctcttctcgctcttctagctctggtggcggcggctctggcggcggtggcgaaattgttctgacccaaagcccggcgaccctgagcctgagcccaggtgaacgcgccaccctgagctgtcgtgcctctcaaagcgtttcttctagctacctggcctggtatcaacagaaaccaggtcaggccccgcgcttactgatttatggtgcgtcttctcgcgcgacgggtatcccagcgcgtttttctggcagcggctctggcaccgatttcacgctgaccatttctcgcctggaaccagaggactttgccgtttattactgcggtacctgggattctagcttatctgccggcgtgtttggtcaaggtacgaaagttgaaattaaa

SEQ ID NO: 218 - DNA, 741 bp, synthetic construct
  source 1..741: mol_type = other DNA
caggtgcagttagttgaaagcggcggtggtgtggtgcaaccgggtcgtagcttacgtttatcttgcgcggcctctggctttacctttagcagctatgcgatgcattgggtgcgtcaggcgccaggtaagggcttagagtgggtggcggttatctcttatgacggtagcaacaagtactacgccgatagcgttaaaggccgcttcacgattagccgcgacaacagcaaaaataccttatacttacagatgaattctttacgcgccgaggatacggccgtttattattgtgccaaagacgccccatctggttacttcgattattggggtcaatggggccaaggcaccctggttacggttagcagcggcggctcttctcgctcttctagctctggtggcggcggctctggcggcggtggcgaaattgttctgacccaaagcccggcgaccctgagcctgagcccaggtgaacgcgccaccctgagctgtcgtgcctctcaaagcgtttcttctagctacctggcctggtatcaacagaaaccaggtcaggccccgcgcttactgatttatggtgcgtcttctcgcgcgacgggtatcccagcgcgtttttctggcagcggctctggcaccgatttcacgctgaccatttctcgcctggaaccagaggactttgccgtttattactgccaacagtataacaattggccacgcacgtttggccagggtacgaaggttgaaatcaaa

SEQ ID NO: 219 - DNA, 744 bp, synthetic construct
  source 1..744: mol_type = other DNA
caggtgcagttagttgaaagcggcggtggtgtggtgcaaccgggtcgtagcttacgtttatcttgcgcggcctctggctttacctttagcagctatgcgatgcattgggtgcgtcaggcgccaggtaagggcttagagtgggtggcggttatctcttatgacggtagcaacaagtactacgccgatagcgttaaaggccgcttcacgattagccgcgacaacagcaaaaataccttatacttacagatgaattctttacgcgccgaggatacggccgtttattattgtgccaaagacttccgcggtggtggttcttttgattactggggtcagtggggtcagggcaccttagttacggtgagcagcggcggttcttctcgctctagctcttctggcggcggcggtagcggcggtggcggcgaaatcgtgctgacgcagagcccggcgaccctgagcctgtctccaggcgagcgcgcgaccctgtcttgccgcgcctctcagtctgtttctagctcttatttagcgtggtaccagcagaagccaggccaagcgccacgcctgctgatttacggcgcctcttctcgtgccacgggtatcccggcgcgtttcagcggcagcggtagcggcaccgacttcaccctgaccatctctcgtctggagccagaggatttcgccgtgtactattgtcagcagtacgataacttattatggacctttggccaaggtacgaaggtggagattaaa

SEQ ID NO: 220 - DNA, 744 bp, synthetic construct
  source 1..744: mol_type = other DNA
caggtgcagttagttgaaagcggcggtggtgtggtgcaaccgggtcgtagcttacgtttatcttgcgcggcctctggctttacctttagcagctatgcgatgcattgggtgcgtcaggcgccaggtaagggcttagagtgggtggcggttatctcttatgacggtagcaacaagtactacgccgatagcgttaaaggccgcttcacgattagccgcgacaacagcaaaaataccttatacttacagatgaattctttacgcgccgaggatacggccgtttattattgtgccaaagacttccgcggtggtggttcttttgattactggggtcagtggggtcagggcaccttagttacggtgagcagcggcggttcttctcgctctagctcttctggcggcggcggtagcggcggtggcggcgaaatcgtgctgacgcagagcccggcgaccctgagcctgtctccaggcgagcgcgcgaccctgtcttgccgcgcctctcagtctgtttctagctcttatttagcgtggtaccagcagaagccaggccaagcgccacgcctgctgatttacggcgcctcttctcgtgccacgggtatcccggcgcgtttcagcggcagcggtagcggcaccgacttcaccctgaccatctctcgtctggagccagaggatttcgccgtgtactattgtcagcagtacaattcttacttatggacctttggccaaggtacgaaggtggagattaaa

SEQ ID NO: 221 - DNA, 753 bp, synthetic construct
  source 1..753: mol_type = other DNA
caggtgcagttagttgaaagcggcggtggtgtggtgcaaccgggtcgtagcttacgtttatcttgcgcggcctctggctttacctttagcagctatgcgatgcattgggtgcgtcaggcgccaggtaagggcttagagtgggtggcggttatctcttatgacggtagcaacaagtactacgccgatagcgttaaaggccgcttcacgattagccgcgacaacagcaaaaataccttatacttacagatgaattctttacgcgccgaggatacggccgtttattattgtgccaaagacggtgccgttacgtacggtgcgctgggtgactattggggtcagtggggccagggtacgttagtgaccgtgagctctggtggttcttctcgttcttctagcagcggcggtggcggctctggcggcggcggtgaaattgttctgacccagagcccggcgaccctgtctttaagcccaggtgaacgtgcgacgctgtcttgtcgcgcgtctcaatctgtgtctagctcttatttagcgtggtatcaacaaaaaccaggccaagccccgcgtctgttaatttacggtgccagctctcgcgccacgggcattccggcccgttttagcggtagcggcagcggtacggattttaccttaacgattagccgcttagagccggaggactttgccgtgtactattgccaagcgtgggacatctctagcacctatgttttcggtcaaggcacgaaagtggaaatcaaa

SEQ ID NO: 222 - DNA, 738 bp, synthetic construct
  source 1..738: mol_type = other DNA
caggtgcagttagttgaaagcggcggtggtgtggtgcaaccgggtcgtagcttacgtttatcttgcgcggcctctggctttacctttagcagctatgcgatgcattgggtgcgtcaggcgccaggtaagggcttagagtgggtggcggttatctcttatgacggtagcaacaagtactacgccgatagcgttaaaggccgcttcacgattagccgcgacaacagcaaaaataccttatacttacagatgaattctttacgcgccgaggatacggccgtttattattgtgccaaagacggtggtgccgttaacttcgattattggggtcaatggggccaaggcaccctggttacggttagcagcggcggctcttctcgctcttctagctctggtggcggcggctctggcggcggtggcgaaattgttctgacccaaagcccggcgaccctgagcctgagcccaggtgaacgcgccaccctgagctgtcgtgcctctcaaagcgtttcttctagctacctggcctggtatcaacagaaaccaggtcaggccccgcgcttactgatttatggtgcgtcttctcgcgcgacgggtatcccagcgcgtttttctggcagcggctctggcaccgatttcacgctgaccatttctcgcctggaaccagaggactttgccgtttattactgccaaaccagcggtacccaagttgtttttggccagggtacgaaggttgaaatcaaa

SEQ ID NO: 223 - DNA, 744 bp, synthetic construct
  source 1..744: mol_type = other DNA
caggtgcagttagttgaaagcggcggtggtgtggtgcaaccgggtcgtagcttacgtttatcttgcgcggcctctggctttacctttagcagctatgcgatgcattgggtgcgtcaggcgccaggtaagggcttagagtgggtggcggttatctcttatgacggtagcaacaagtactacgccgatagcgttaaaggccgcttcacgattagccgcgacaacagcaaaaataccttatacttacagatgaattctttacgcgccgaggatacggccgtttattattgtgccaaagacggtggtggtgtttacacgctggattactggggtcagtggggtcagggcaccttagttacggtgagcagcggcggttcttctcgctctagctcttctggcggcggcggtagcggcggtggcggcgaaatcgtgctgacgcagagcccggcgaccctgagcctgtctccaggcgagcgcgcgaccctgtcttgccgcgcctctcagtctgtttctagctcttatttagcgtggtaccagcagaagccaggccaagcgccacgcctgctgatttacggcgcctcttctcgtgccacgggtatcccggcgcgtttcagcggcagcggtagcggcaccgacttcaccctgaccatctctcgtctggagccagaggatttcgccgtgtactattgtctgctgtcttattcttctgttcgtgtgtttggtcaaggtacgaaagttgaaattaaa

SEQ ID NO: 224 - DNA, 747 bp, synthetic construct
  source 1..747: mol_type = other DNA
caggtgcagttagttgaaagcggcggtggtgtggtgcaaccgggtcgtagcttacgtttatcttgcgcggcctctggctttacctttagcagctatgcgatgcattgggtgcgtcaggcgccaggtaagggcttagagtgggtggcggttatctcttatgacggtagcaacaagtactacgccgatagcgttaaaggccgcttcacgattagccgcgacaacagcaaaaataccttatacttacagatgaattctttacgcgccgaggatacggccgtttattattgtgccaaagacggtggtggtgtttacacgctggattactggggtcagtggggtcagggcaccttagttacggtgagcagcggcggttcttctcgctctagctcttctggcggcggcggtagcggcggtggcggcgaaatcgtgctgacgcagagcccggcgaccctgagcctgtctccaggcgagcgcgcgaccctgtcttgccgcgcctctcagtctgtttctagctcttatttagcgtggtaccagcagaagccaggccaagcgccacgcctgctgatttacggcgcctcttctcgtgccacgggtatcccggcgcgtttcagcggcagcggtagcggcaccgacttcaccctgaccatctctcgtctggagccagaggatttcgccgtgtactattgtcagcagtacggctcttctccagcgtggacctttggtcaaggtacgaaagttgaaattaaa

SEQ ID NO: 225 - DNA, 750 bp, synthetic construct
  source 1..750: mol_type = other DNA
caggtgcagttagttgaaagcggcggtggtgtggtgcaaccgggtcgtagcttacgtttatcttgcgcggcctctggctttacctttagcagctatgcgatgcattgggtgcgtcaggcgccaggtaagggcttagagtgggtggcggttatctcttatgacggtagcaacaagtactacgccgatagcgttaaaggccgcttcacgattagccgcgacaacagcaaaaataccttatacttacagatgaattctttacgcgccgaggatacggccgtttattattgtgccaaagacggtggtggtgtttacacgctggattactggggtcagtggggtcagggcaccttagttacggtgagcagcggcggttcttctcgctctagctcttctggcggcggcggtagcggcggtggcggcgaaatcgtgctgacgcagagcccggcgaccctgagcctgtctccaggcgagcgcgcgaccctgtcttgccgcgcctctcagtctgtttctagctcttatttagcgtggtaccagcagaagccaggccaagcgccacgcctgctgatttacggcgcctcttctcgtgccacgggtatcccggcgcgtttcagcggcagcggtagcggcaccgacttcaccctgaccatctctcgtctggagccagaggatttcgccgtgtactattgtcagagctacgattctggtttacgtggcaaagttttcggtcaaggcacgaaagtggaaatcaaa

SEQ ID NO: 226 - DNA, 750 bp, synthetic construct
  source 1..750: mol_type = other DNA
caggtgcagttagttgaaagcggcggtggtgtggtgcaaccgggtcgtagcttacgtttatcttgcgcggcctctggctttacctttagcagctatgcgatgcattgggtgcgtcaggcgccaggtaagggcttagagtgggtggcggttatctcttatgacggtagcaacaagtactacgccgatagcgttaaaggccgcttcacgattagccgcgacaacagcaaaaataccttatacttacagatgaattctttacgcgccgaggatacggccgtttattattgtgccaaagacggtggtggtgtttacacgctggattactggggtcagtggggtcagggcaccttagttacggtgagcagcggcggttcttctcgctctagctcttctggcggcggcggtagcggcggtggcggcgaaatcgtgctgacgcagagcccggcgaccctgagcctgtctccaggcgagcgcgcgaccctgtcttgccgcgcctctcagtctgtttctagctcttatttagcgtggtaccagcagaagccaggccaagcgccacgcctgctgatttacggcgcctcttctcgtgccacgggtatcccggcgcgtttcagcggcagcggtagcggcaccgacttcaccctgaccatctctcgtctggagccagaggatttcgccgtgtactattgtcagagctacgattcttctcgcagcggctatgttttcggtcaaggcacgaaagtggaaatcaaa

SEQ ID NO: 227 - DNA, 753 bp, synthetic construct
  source 1..753: mol_type = other DNA
caggtgcagttagttgaaagcggcggtggtgtggtgcaaccgggtcgtagcttacgtttatcttgcgcggcctctggctttacctttagcagctatgcgatgcattgggtgcgtcaggcgccaggtaagggcttagagtgggtggcggttatctcttatgacggtagcaacaagtactacgccgatagcgttaaaggccgcttcacgattagccgcgacaacagcaaaaataccttatacttacagatgaattctttacgcgccgaggatacggccgtttattattgtgccaaagacggtggtggtgtttacacgctggattactggggtcagtggggtcagggcaccttagttacggtgagcagcggcggttcttctcgctctagctcttctggcggcggcggtagcggcggtggcggcgaaatcgtgctgacgcagagcccggcgaccctgagcctgtctccaggcgagcgcgcgaccctgtcttgccgcgcctctcagtctgtttctagctcttatttagcgtggtaccagcagaagccaggccaagcgccacgcctgctgatttacggcgcctcttctcgtgccacgggtatcccggcgcgtttcagcggcagcggtagcggcaccgacttcaccctgaccatctctcgtctggagccagaggatttcgccgtgtactattgtcaggtgtgggacaattcttctgacccgcattatgttttcggtcaaggcacgaaagtggaaatcaaa

SEQ ID NO: 228 - DNA, 780 bp, synthetic construct
  source 1..780: mol_type = other DNA
caggtgcagttagttgaaagcggcggtggtgtggtgcaaccgggtcgtagcttacgtttatcttgcgcggcctctggctttacctttagcagctatgcgatgcattgggtgcgtcaggcgccaggtaagggcttagagtgggtggcggttatctcttatgacggtagcaacaagtactacgccgatagcgttaaaggccgcttcacgattagccgcgacaacagcaaaaataccttatacttacagatgaattctttacgcgccgaggatacggccgtttattattgtgccaaagacggtggtttataccgctacttttattactacaaagttggcgatgcgttcgactactggggccagtggggccagggtacgttagttacggtgtcttctggcggcagctctcgtagctctagcagcggcggtggcggctctggcggcggcggcgaaattgtgctgacgcaaagcccagccaccctgagcttaagcccaggtgagcgtgccacgttaagctgtcgtgccagccaaagcgtgtcttctagctacctggcctggtaccagcagaaaccaggccaagccccacgtttattaatctacggcgcgagctctcgtgcgaccggtattccggcgcgcttcagcggcagcggttctggcaccgacttcacgctgacgatcagccgcctggagccggaagactttgccgtttactattgccagtctgccgactctagcggtacctatccgtgggttttcggtcagggtacgaaagttgaaattaaa

SEQ ID NO: 229 - DNA, 768 bp, synthetic construct
  source 1..768: mol_type = other DNA
caggtgcagttagttgaaagcggcggtggtgtggtgcaaccgggtcgtagcttacgtttatcttgcgcggcctctggctttacctttagcagctatgcgatgcattgggtgcgtcaggcgccaggtaagggcttagagtgggtggcggttatctcttatgacggtagcaacaagtactacgccgatagcgttaaaggccgcttcacgattagccgcgacaacagcaaaaataccttatacttacagatgaattctttacgcgccgaggatacggccgtttattattgtgccaaagacggtcactggtaccgcggttactatggctcttactatttagattattggggccaatggggtcaaggcaccctggtgacggtttcttctggtggctcttctcgtagcagctctagcggcggtggcggcagcggtggcggcggtgaaattgtgctgacccagagcccggccacgctgtctttaagcccgggcgagcgtgccacgttaagctgtcgcgccagccaaagcgttagctctagctatttagcctggtatcaacagaagccaggccaggcgccacgtttattaatctatggtgcctcttctcgtgcgaccggtattccggcgcgctttagcggctctggtagcggcaccgacttcaccctgacgatctctcgtttagagccggaggatttcgcggtgtactattgtgccgcctgggatgatagcttaatcgacccagtgttcggccagggcacgaaggttgaaatcaaa

SEQ ID NO: 230 - DNA, 768 bp, synthetic construct
  source 1..768: mol_type = other DNA
caggtgcagttagttgaaagcggcggtggtgtggtgcaaccgggtcgtagcttacgtttatcttgcgcggcctctggctttacctttagcagctatgcgatgcattgggtgcgtcaggcgccaggtaagggcttagagtgggtggcggttatctcttatgacggtagcaacaagtactacgccgatagcgttaaaggccgcttcacgattagccgcgacaacagcaaaaataccttatacttacagatgaattctttacgcgccgaggatacggccgtttattattgtgccaaagacggtcactggtaccgcggttactatggctcttactatttagattattggggccaatggggtcaaggcaccctggtgacggtttcttctggtggctcttctcgtagcagctctagcggcggtggcggcagcggtggcggcggtgaaattgtgctgacccagagcccggccacgctgtctttaagcccgggcgagcgtgccacgttaagctgtcgcgccagccaaagcgttagctctagctatttagcctggtatcaacagaagccaggccaggcgccacgtttattaatctatggtgcctcttctcgtgcgaccggtattccggcgcgctttagcggctctggtagcggcaccgacttcaccctgacgatctctcgtttagagccggaggatttcgcggtgtactattgtgccgcctgggatgatagcttaaacgccgttgtgttcggccagggcacgaaggttgaaatcaaa

SEQ ID NO: 231 - DNA, 768 bp, synthetic construct
  source 1..768: mol_type = other DNA
caggtgcagttagttgaaagcggcggtggtgtggtgcaaccgggtcgtagcttacgtttatcttgcgcggcctctggctttacctttagcagctatgcgatgcattgggtgcgtcaggcgccaggtaagggcttagagtgggtggcggttatctcttatgacggtagcaacaagtactacgccgatagcgttaaaggccgcttcacgattagccgcgacaacagcaaaaataccttatacttacagatgaattctttacgcgccgaggatacggccgtttattattgtgccaaagacggtcactggtaccgcggttactatggctcttactatttagattattggggccaatggggtcaaggcaccctggtgacggtttcttctggtggctcttctcgtagcagctctagcggcggtggcggcagcggtggcggcggtgaaattgtgctgacccagagcccggccacgctgtctttaagcccgggcgagcgtgccacgttaagctgtcgcgccagccaaagcgttagctctagctatttagcctggtatcaacagaagccaggccaggcgccacgtttattaatctatggtgcctcttctcgtgcgaccggtattccggcgcgctttagcggctctggtagcggcaccgacttcaccctgacgatctctcgtttagagccggaggatttcgcggtgtactattgtgccgcctgggatgatagcccaaacggtcgcgtgttcggccagggcacgaaggttgaaatcaaa

SEQ ID NO: 232 - DNA, 768 bp, synthetic construct
  source 1..768: mol_type = other DNA
caggtgcagttagttgaaagcggcggtggtgtggtgcaaccgggtcgtagcttacgtttatcttgcgcggcctctggctttacctttagcagctatgcgatgcattgggtgcgtcaggcgccaggtaagggcttagagtgggtggcggttatctcttatgacggtagcaacaagtactacgccgatagcgttaaaggccgcttcacgattagccgcgacaacagcaaaaataccttatacttacagatgaattctttacgcgccgaggatacggccgtttattattgtgccaaagacggtcactggtaccgcggttactatggctcttactatttagattattggggccaatggggtcaaggcaccctggtgacggtttcttctggtggctcttctcgtagcagctctagcggcggtggcggcagcggtggcggcggtgaaattgtgctgacccagagcccggccacgctgtctttaagcccgggcgagcgtgccacgttaagctgtcgcgccagccaaagcgttagctctagctatttagcctggtatcaacagaagccaggccaggcgccacgtttattaatctatggtgcctcttctcgtgcgaccggtattccggcgcgctttagcggctctggtagcggcaccgacttcaccctgacgatctctcgtttagagccggaggatttcgcggtgtactattgtgccggttgggatgatagcttatctggttgggtttttggtcagggcaccaaggttgagattaaa

SEQ ID NO: 233 - DNA, 768 bp, synthetic construct
  source 1..768: mol_type = other DNA
caggtgcagttagttgaaagcggcggtggtgtggtgcaaccgggtcgtagcttacgtttatcttgcgcggcctctggctttacctttagcagctatgcgatgcattgggtgcgtcaggcgccaggtaagggcttagagtgggtggcggttatctcttatgacggtagcaacaagtactacgccgatagcgttaaaggccgcttcacgattagccgcgacaacagcaaaaataccttatacttacagatgaattctttacgcgccgaggatacggccgtttattattgtgccaaagacggtcactggtaccgcggttactatggctcttactatttagattattggggccaatggggtcaaggcaccctggtgacggtttcttctggtggctcttctcgtagcagctctagcggcggtggcggcagcggtggcggcggtgaaattgtgctgacccagagcccggccacgctgtctttaagcccgggcgagcgtgccacgttaagctgtcgcgccagccaaagcgttagctctagctatttagcctggtatcaacagaagccaggccaggcgccacgtttattaatctatggtgcctcttctcgtgcgaccggtattccggcgcgctttagcggctctggtagcggcaccgacttcaccctgacgatctctcgtttagagccggaggatttcgcggtgtactattgtgcctcttgggatgatagcttaaacggtcgcgtgttcggccagggcacgaaggttgaaatcaaa

SEQ ID NO: 234 - DNA, 768 bp, synthetic construct
  source 1..768: mol_type = other DNA
caggtgcagttagttgaaagcggcggtggtgtggtgcaaccgggtcgtagcttacgtttatcttgcgcggcctctggctttacctttagcagctatgcgatgcattgggtgcgtcaggcgccaggtaagggcttagagtgggtggcggttatctcttatgacggtagcaacaagtactacgccgatagcgttaaaggccgcttcacgattagccgcgacaacagcaaaaataccttatacttacagatgaattctttacgcgccgaggatacggccgtttattattgtgccaaagacggtcactggtaccgcggttactatggctcttactatttagattattggggccaatggggtcaaggcaccctggtgacggtttcttctggtggctcttctcgtagcagctctagcggcggtggcggcagcggtggcggcggtgaaattgtgctgacccagagcccggccacgctgtctttaagcccgggcgagcgtgccacgttaagctgtcgcgccagccaaagcgttagctctagctatttagcctggtatcaacagaagccaggccaggcgccacgtttattaatctatggtgcctcttctcgtgcgaccggtattccggcgcgctttagcggctctggtagcggcaccgacttcaccctgacgatctctcgtttagagccggaggatttcgcggtgtactattgtggtgtttgggatagcagcgttggtggttgggtttttggtcagggcaccaaggttgagattaaa

SEQ ID NO: 235 - DNA, 762 bp, synthetic construct
  source 1..762: mol_type = other DNA
caggtgcagttagttgaaagcggcggtggtgtggtgcaaccgggtcgtagcttacgtttatcttgcgcggcctctggctttacctttagcagctatgcgatgcattgggtgcgtcaggcgccaggtaagggcttagagtgggtggcggttatctcttatgacggtagcaacaagtactacgccgatagcgttaaaggccgcttcacgattagccgcgacaacagcaaaaataccttatacttacagatgaattctttacgcgccgaggatacggccgtttattattgtgccaaagacggtcactggtaccgcggttactatggctcttactatttagattattggggccaatggggtcaaggcaccctggtgacggtttcttctggtggctcttctcgtagcagctctagcggcggtggcggcagcggtggcggcggtgaaattgtgctgacccagagcccggccacgctgtctttaagcccgggcgagcgtgccacgttaagctgtcgcgccagccaaagcgttagctctagctatttagcctggtatcaacagaagccaggccaggcgccacgtttattaatctatggtgcctcttctcgtgcgaccggtattccggcgcgctttagcggctctggtagcggcaccgacttcaccctgacgatctctcgtttagagccggaggatttcgcggtgtactattgtcaagcctgggatagcaatacggccgttttcggccaaggcaccaaagttgagatcaaa

SEQ ID NO: 236 - DNA, 762 bp, synthetic construct
  source 1..762: mol_type = other DNA
caggtgcagttagttgaaagcggcggtggtgtggtgcaaccgggtcgtagcttacgtttatcttgcgcggcctctggctttacctttagcagctatgcgatgcattgggtgcgtcaggcgccaggtaagggcttagagtgggtggcggttatctcttatgacggtagcaacaagtactacgccgatagcgttaaaggccgcttcacgattagccgcgacaacagcaaaaataccttatacttacagatgaattctttacgcgccgaggatacggccgtttattattgtgccaaagacggtcactggtaccgcggttactatggctcttactatttagattattggggccaatggggtcaaggcaccctggtgacggtttcttctggtggctcttctcgtagcagctctagcggcggtggcggcagcggtggcggcggtgaaattgtgctgacccagagcccggccacgctgtctttaagcccgggcgagcgtgccacgttaagctgtcgcgccagccaaagcgttagctctagctatttagcctggtatcaacagaagccaggccaggcgccacgtttattaatctatggtgcctcttctcgtgcgaccggtattccggcgcgctttagcggctctggtagcggcaccgacttcaccctgacgatctctcgtttagagccggaggatttcgcggtgtactattgtcaacaaagctatagcccaccaccaacgtttggtcagggcaccaaggttgagattaaa

SEQ ID NO: 237 - DNA, 771 bp, synthetic construct
  source 1..771: mol_type = other DNA
caggtgcagttagttgaaagcggcggtggtgtggtgcaaccgggtcgtagcttacgtttatcttgcgcggcctctggctttacctttagcagctatgcgatgcattgggtgcgtcaggcgccaggtaagggcttagagtgggtggcggttatctcttatgacggtagcaacaagtactacgccgatagcgttaaaggccgcttcacgattagccgcgacaacagcaaaaataccttatacttacagatgaattctttacgcgccgaggatacggccgtttattattgtgccaaagacggtcactggtaccgcggttactatggctcttactatttagattattggggccaatggggtcaaggcaccctggtgacggtttcttctggtggctcttctcgtagcagctctagcggcggtggcggcagcggtggcggcggtgaaattgtgctgacccagagcccggccacgctgtctttaagcccgggcgagcgtgccacgttaagctgtcgcgccagccaaagcgttagctctagctatttagcctggtatcaacagaagccaggccaggcgccacgtttattaatctatggtgcctcttctcgtgcgaccggtattccggcgcgctttagcggctctggtagcggcaccgacttcaccctgacgatctctcgtttagagccggaggatttcgcggtgtactattgtcaatcttatgatagctctttattaccaggcgttgtgtttggccaaggtacgaaagttgagattaaa

SEQ ID NO: 238 - DNA, 762 bp, synthetic construct
  source 1..762: mol_type = other DNA
caggtgcagttagttgaaagcggcggtggtgtggtgcaaccgggtcgtagcttacgtttatcttgcgcggcctctggctttacctttagcagctatgcgatgcattgggtgcgtcaggcgccaggtaagggcttagagtgggtggcggttatctcttatgacggtagcaacaagtactacgccgatagcgttaaaggccgcttcacgattagccgcgacaacagcaaaaataccttatacttacagatgaattctttacgcgccgaggatacggccgtttattattgtgccaaagacggtcactggtaccgcggttactatggctcttactatttagattattggggccaatggggtcaaggcaccctggtgacggtttcttctggtggctcttctcgtagcagctctagcggcggtggcggcagcggtggcggcggtgaaattgtgctgacccagagcccggccacgctgtctttaagcccgggcgagcgtgccacgttaagctgtcgcgccagccaaagcgttagctctagctatttagcctggtatcaacagaagccaggccaggcgccacgtttattaatctatggtgcctcttctcgtgcgaccggtattccggcgcgctttagcggctctggtagcggcaccgacttcaccctgacgatctctcgtttagagccggaggatttcgcggtgtactattgtcaaacgtgggatagctttggtcaagttttcggccaaggcaccaaagttgagatcaaa

SEQ ID NO: 239 - DNA, 747 bp, synthetic construct
  source 1..747: mol_type = other DNA
caggtgcagttagttgaaagcggcggtggtgtggtgcaaccgggtcgtagcttacgtttatcttgcgcggcctctggctttacctttagcagctatgcgatgcattgggtgcgtcaggcgccaggtaagggcttagagtgggtggcggttatctcttatgacggtagcaacaagtactacgccgatagcgttaaaggccgcttcacgattagccgcgacaacagcaaaaataccttatacttacagatgaattctttacgcgccgaggatacggccgtttattattgtgccaaagacggtcgctctgccgccatcgattattggggtcaatggggccaaggcaccctggttacggttagcagcggcggctcttctcgctcttctagctctggtggcggcggctctggcggcggtggcgaaattgttctgacccaaagcccggcgaccctgagcctgagcccaggtgaacgcgccaccctgagctgtcgtgcctctcaaagcgtttcttctagctacctggcctggtatcaacagaaaccaggtcaggccccgcgcttactgatttatggtgcgtcttctcgcgcgacgggtatcccagcgcgtttttctggcagcggctctggcaccgatttcacgctgaccatttctcgcctggaaccagaggactttgccgtttattactgctctagctatacgagctcttcttctctggtggtgttcggtcaaggtaccaaggtggaaattaaa

SEQ ID NO: 240 - DNA, 765 bp, synthetic construct
  source 1..765: mol_type = other DNA
caggtgcagttagttgaaagcggcggtggtgtggtgcaaccgggtcgtagcttacgtttatcttgcgcggcctctggctttacctttagcagctatgcgatgcattgggtgcgtcaggcgccaggtaagggcttagagtgggtggcggttatctcttatgacggtagcaacaagtactacgccgatagcgttaaaggccgcttcacgattagccgcgacaacagcaaaaataccttatacttacagatgaattctttacgcgccgaggatacggccgtttattattgtgccaaagaccactctgcctaccgcggtggcttttactcttatacgtttgattattggggtcaatggggtcagggcaccctggttacggtttcttctggcggttctagccgtagctctagcagcggtggcggcggctctggcggcggtggcgaaattgtgctgacccagagcccagccaccttatctctgagcccgggtgaacgcgccacgctgtcttgtcgcgcgtctcagtctgtgtctagcagctacttagcgtggtaccagcaaaagccgggccaggccccgcgcttattaatttacggtgcctctagccgtgcgacgggcattccggcccgttttagcggttctggcagcggcacggactttaccttaacgatcagccgcttagaaccagaagactttgcggtttattactgtcaagcgtgggatagcacggaccacgttgtgttcggccagggcacgaaggttgaaatcaaa

SEQ ID NO: 241 - DNA, 750 bp, synthetic construct
  source 1..750: mol_type = other DNA
caggtgcagttagttgaaagcggcggtggtgtggtgcaaccgggtcgtagcttacgtttatcttgcgcggcctctggctttacctttagcagctatgcgatgcattgggtgcgtcaggcgccaggtaagggcttagagtgggtggcggttatctcttatgacggtagcaacaagtactacgccgatagcgttaaaggccgcttcacgattagccgcgacaacagcaaaaataccttatacttacagatgaattctttacgcgccgaggatacggccgtttattattgtgccaaagaccacacgatgttaggttctttcgattattggggtcaatggggccaaggcaccctggttacggttagcagcggcggctcttctcgctcttctagctctggtggcggcggctctggcggcggtggcgaaattgttctgacccaaagcccggcgaccctgagcctgagcccaggtgaacgcgccaccctgagctgtcgtgcctctcaaagcgtttcttctagctacctggcctggtatcaacagaaaccaggtcaggccccgcgcttactgatttatggtgcgtcttctcgcgcgacgggtatcccagcgcgtttttctggcagcggctctggcaccgatttcacgctgaccatttctcgcctggaaccagaggactttgccgtttattactgcggtacctgggattctagccgcggttctggcgtgtttggtcaaggtacgaaagttgaaattaaa

SEQ ID NO: 242 - DNA, 750 bp, synthetic construct
  source 1..750: mol_type = other DNA
caggtgcagttagttgaaagcggcggtggtgtggtgcaaccgggtcgtagcttacgtttatcttgcgcggcctctggctttacctttagcagctatgcgatgcattgggtgcgtcaggcgccaggtaagggcttagagtgggtggcggttatctcttatgacggtagcaacaagtactacgccgatagcgttaaaggccgcttcacgattagccgcgacaacagcaaaaataccttatacttacagatgaattctttacgcgccgaggatacggccgtttattattgtgccaaagaccacacgatgttaggttctttcgattattggggtcaatggggccaaggcaccctggttacggttagcagcggcggctcttctcgctcttctagctctggtggcggcggctctggcggcggtggcgaaattgttctgacccaaagcccggcgaccctgagcctgagcccaggtgaacgcgccaccctgagctgtcgtgcctctcaaagcgtttcttctagctacctggcctggtatcaacagaaaccaggtcaggccccgcgcttactgatttatggtgcgtcttctcgcgcgacgggtatcccagcgcgtttttctggcagcggctctggcaccgatttcacgctgaccatttctcgcctggaaccagaggactttgccgtttattactgccaacagtatggtagccgctctccagtgtggagctttggtcaaggtacgaaagttgaaattaaa

SEQ ID NO: 243 - DNA, 747 bp, synthetic construct
  source 1..747: mol_type = other DNA
caggtgcagttagttgaaagcggcggtggtgtggtgcaaccgggtcgtagcttacgtttatcttgcgcggcctctggctttacctttagcagctatgcgatgcattgggtgcgtcaggcgccaggtaagggcttagagtgggtggcggttatctcttatgacggtagcaacaagtactacgccgatagcgttaaaggccgcttcacgattagccgcgacaacagcaaaaataccttatacttacagatgaattctttacgcgccgaggatacggccgtttattattgtgccaaagaccacacgatgttaggttctttcgattattggggtcaatggggccaaggcaccctggttacggttagcagcggcggctcttctcgctcttctagctctggtggcggcggctctggcggcggtggcgaaattgttctgacccaaagcccggcgaccctgagcctgagcccaggtgaacgcgccaccctgagctgtcgtgcctctcaaagcgtttcttctagctacctggcctggtatcaacagaaaccaggtcaggccccgcgcttactgatttatggtgcgtcttctcgcgcgacgggtatcccagcgcgtttttctggcagcggctctggcaccgatttcacgctgaccatttctcgcctggaaccagaggactttgccgtttattactgctctctgtattacggcggtggtgaccgtctgtttggtcaaggtacgaaagttgaaattaaa

SEQ ID NO: 244 - DNA, 744 bp, synthetic construct
  source 1..744: mol_type = other DNA
caggtgcagttagttgaaagcggcggtggtgtggtgcaaccgggtcgtagcttacgtttatcttgcgcggcctctggctttacctttagcagctatgcgatgcattgggtgcgtcaggcgccaggtaagggcttagagtgggtggcggttatctcttatgacggtagcaacaagtactacgccgatagcgttaaaggccgcttcacgattagccgcgacaacagcaaaaataccttatacttacagatgaattctttacgcgccgaggatacggccgtttattattgtgccaaagacatctggtactacttcgactactggggccagtggggtcaaggcacgctggtgaccgtttcttctggcggcagcagccgctcttcttcttctggcggtggtggcagcggcggtggcggcgagattgtgctgacgcagagcccagcgaccctgagcctgagcccgggcgagcgcgcgacgttaagctgccgtgccagccaatctgttagctcttcttacctggcctggtatcaacagaagccgggccaagccccgcgcctgttaatctatggcgcgtctagccgcgccacgggcatcccagcccgctttagcggctctggcagcggcacggattttaccttaacgattagccgtttagagccggaagacttcgccgtgtactactgccaaagctgggccaaaagcggtggcaaccgcgtttttggccagggtacgaaggttgaaatcaaa

SEQ ID NO: 245 - DNA, 768 bp, synthetic construct
  source 1..768: mol_type = other DNA
caggtgcagttagttgaaagcggcggtggtgtggtgcaaccgggtcgtagcttacgtttatcttgcgcggcctctggctttacctttagcagctatgcgatgcattgggtgcgtcaggcgccaggtaagggcttagagtgggtggcggttatctcttatgacggtagcaacaagtactacgccgatagcgttaaaggccgcttcacgattagccgcgacaacagcaaaaataccttatacttacagatgaattctttacgcgccgaggatacggccgtttattattgtgccaaagacttaggtacgggtttcatgcaaggctattgggccttagattactggggccagtggggccaaggtacgctggtgaccgtgtcttctggtggttctagccgctctagcagcagcggtggcggcggtagcggcggcggtggcgaaatcgtgctgacccagagcccggcgaccttatctctgtctccaggcgaacgtgccaccttatcttgtcgtgcctctcaaagcgttagctctagctacctggcgtggtaccaacagaagccgggtcaagcgccgcgtttactgatctacggtgcgtcttctcgcgccaccggcattccagcgcgtttttctggcagcggctctggtaccgattttacgttaaccatttctcgcttagaaccagaggatttcgcggtttattattgtaattctcgcgacagccgtggcaacaacttatgggtttttggtcagggcaccaaggttgagattaaa

SEQ ID NO: 246 - DNA, 744 bp, synthetic construct
  source 1..744: mol_type = other DNA
caggtgcagttagttgaaagcggcggtggtgtggtgcaaccgggtcgtagcttacgtttatcttgcgcggcctctggctttacctttagcagctatgcgatgcattgggtgcgtcaggcgccaggtaagggcttagagtgggtggcggttatctcttatgacggtagcaacaagtactacgccgatagcgttaaaggccgcttcacgattagccgcgacaacagcaaaaataccttatacttacagatgaattctttacgcgccgaggatacggccgtttattattgtgccaaagacttaatcggttcttctttcgattattggggtcaatggggccaaggcaccctggttacggttagcagcggcggctcttctcgctcttctagctctggtggcggcggctctggcggcggtggcgaaattgttctgacccaaagcccggcgaccctgagcctgagcccaggtgaacgcgccaccctgagctgtcgtgcctctcaaagcgtttcttctagctacctggcctggtatcaacagaaaccaggtcaggccccgcgcttactgatttatggtgcgtcttctcgcgcgacgggtatcccagcgcgtttttctggcagcggctctggcaccgatttcacgctgaccatttctcgcctggaaccagaggactttgccgtttattactgccaaacctgggatatcggcacgtacgttgtgtttggccaaggtacgaaggtggagattaaa

SEQ ID NO: 247 - DNA, 744 bp, synthetic construct
  source 1..744: mol_type = other DNA
caggtgcagttagttgaaagcggcggtggtgtggtgcaaccgggtcgtagcttacgtttatcttgcgcggcctctggctttacctttagcagctatgcgatgcattgggtgcgtcaggcgccaggtaagggcttagagtgggtggcggttatctcttatgacggtagcaacaagtactacgccgatagcgttaaaggccgcttcacgattagccgcgacaacagcaaaaataccttatacttacagatgaattctttacgcgccgaggatacggccgtttattattgtgccaaagacttaatctacacggcccaagattattggggtcaatggggccaaggcaccctggttacggttagcagcggcggctcttctcgctcttctagctctggtggcggcggctctggcggcggtggcgaaattgttctgacccaaagcccggcgaccctgagcctgagcccaggtgaacgcgccaccctgagctgtcgtgcctctcaaagcgtttcttctagctacctggcctggtatcaacagaaaccaggtcaggccccgcgcttactgatttatggtgcgtcttctcgcgcgacgggtatcccagcgcgtttttctggcagcggctctggcaccgatttcacgctgaccatttctcgcctggaaccagaggactttgccgtttattactgccaagcgtgggattctagcccattagttgtgtttggccaaggtacgaaggtggagattaaa

SEQ ID NO: 248 - DNA, 744 bp, synthetic construct
  source 1..744: mol_type = other DNA
caggtgcagttagttgaaagcggcggtggtgtggtgcaaccgggtcgtagcttacgtttatcttgcgcggcctctggctttacctttagcagctatgcgatgcattgggtgcgtcaggcgccaggtaagggcttagagtgggtggcggttatctcttatgacggtagcaacaagtactacgccgatagcgttaaaggccgcttcacgattagccgcgacaacagcaaaaataccttatacttacagatgaattctttacgcgccgaggatacggccgtttattattgtgccaaagacttaatctacacggcccaagattattggggtcaatggggccaaggcaccctggttacggttagcagcggcggctcttctcgctcttctagctctggtggcggcggctctggcggcggtggcgaaattgttctgacccaaagcccggcgaccctgagcctgagcccaggtgaacgcgccaccctgagctgtcgtgcctctcaaagcgtttcttctagctacctggcctggtatcaacagaaaccaggtcaggccccgcgcttactgatttatggtgcgtcttctcgcgcgacgggtatcccagcgcgtttttctggcagcggctctggcaccgatttcacgctgaccatttctcgcctggaaccagaggactttgccgtttattactgccaagcgtgggattctacctctttagttgtgtttggccaaggtacgaaggtggagattaaa

SEQ ID NO: 249 - DNA, 744 bp, synthetic construct
  source 1..744: mol_type = other DNA
caggtgcagttagttgaaagcggcggtggtgtggtgcaaccgggtcgtagcttacgtttatcttgcgcggcctctggctttacctttagcagctatgcgatgcattgggtgcgtcaggcgccaggtaagggcttagagtgggtggcggttatctcttatgacggtagcaacaagtactacgccgatagcgttaaaggccgcttcacgattagccgcgacaacagcaaaaataccttatacttacagatgaattctttacgcgccgaggatacggccgtttattattgtgccaaagacttaatctacacggcccaagattattggggtcaatggggccaaggcaccctggttacggttagcagcggcggctcttctcgctcttctagctctggtggcggcggctctggcggcggtggcgaaattgttctgacccaaagcccggcgaccctgagcctgagcccaggtgaacgcgccaccctgagctgtcgtgcctctcaaagcgtttcttctagctacctggcctggtatcaacagaaaccaggtcaggccccgcgcttactgatttatggtgcgtcttctcgcgcgacgggtatcccagcgcgtttttctggcagcggctctggcaccgatttcacgctgaccatttctcgcctggaaccagaggactttgccgtttattactgccaacattttggtagctctccaaagctgacctttggtcaaggtacgaaagttgaaattaaa

SEQ ID NO: 250 - DNA, 741 bp, synthetic construct
  source 1..741: mol_type = other DNA
caggtgcagttagttgaaagcggcggtggtgtggtgcaaccgggtcgtagcttacgtttatcttgcgcggcctctggctttacctttagcagctatgcgatgcattgggtgcgtcaggcgccaggtaagggcttagagtgggtggcggttatctcttatgacggtagcaacaagtactacgccgatagcgttaaaggccgcttcacgattagccgcgacaacagcaaaaataccttatacttacagatgaattctttacgcgccgaggatacggccgtttattattgtgccaaagacttaatctacacggcccaagattattggggtcaatggggccaaggcaccctggttacggttagcagcggcggctcttctcgctcttctagctctggtggcggcggctctggcggcggtggcgaaattgttctgacccaaagcccggcgaccctgagcctgagcccaggtgaacgcgccaccctgagctgtcgtgcctctcaaagcgtttcttctagctacctggcctggtatcaacagaaaccaggtcaggccccgcgcttactgatttatggtgcgtcttctcgcgcgacgggtatcccagcgcgtttttctggcagcggctctggcaccgatttcacgctgaccatttctcgcctggaaccagaggactttgccgtttattactgccaacagagctacagcccaccaccaacctttggccaaggtacgaaggtggagattaaa

SEQ ID NO: 251 - DNA, 741 bp, synthetic construct
  source 1..741: mol_type = other DNA
caggtgcagttagttgaaagcggcggtggtgtggtgcaaccgggtcgtagcttacgtttatcttgcgcggcctctggctttacctttagcagctatgcgatgcattgggtgcgtcaggcgccaggtaagggcttagagtgggtggcggttatctcttatgacggtagcaacaagtactacgccgatagcgttaaaggccgcttcacgattagccgcgacaacagcaaaaataccttatacttacagatgaattctttacgcgccgaggatacggccgtttattattgtgccaaagacttaatctacacggcccaagattattggggtcaatggggccaaggcaccctggttacggttagcagcggcggctcttctcgctcttctagctctggtggcggcggctctggcggcggtggcgaaattgttctgacccaaagcccggcgaccctgagcctgagcccaggtgaacgcgccaccctgagctgtcgtgcctctcaaagcgtttcttctagctacctggcctggtatcaacagaaaccaggtcaggccccgcgcttactgatttatggtgcgtcttctcgcgcgacgggtatcccagcgcgtttttctggcagcggctctggcaccgatttcacgctgaccatttctcgcctggaaccagaggactttgccgtttattactgccaacagtataacagcttcccattaacctttggccaaggtacgaaggtggagattaaa

SEQ ID NO: 252 - DNA, 747 bp, synthetic construct
  source 1..747: mol_type = other DNA
caggtgcagttagttgaaagcggcggtggtgtggtgcaaccgggtcgtagcttacgtttatcttgcgcggcctctggctttacctttagcagctatgcgatgcattgggtgcgtcaggcgccaggtaagggcttagagtgggtggcggttatctcttatgacggtagcaacaagtactacgccgatagcgttaaaggccgcttcacgattagccgcgacaacagcaaaaataccttatacttacagatgaattctttacgcgccgaggatacggccgtttattattgtgccaaagacttaatctacacggcccaagattattggggtcaatggggccaaggcaccctggttacggttagcagcggcggctcttctcgctcttctagctctggtggcggcggctctggcggcggtggcgaaattgttctgacccaaagcccggcgaccctgagcctgagcccaggtgaacgcgccaccctgagctgtcgtgcctctcaaagcgtttcttctagctacctggcctggtatcaacagaaaccaggtcaggccccgcgcttactgatttatggtgcgtcttctcgcgcgacgggtatcccagcgcgtttttctggcagcggctctggcaccgatttcacgctgaccatttctcgcctggaaccagaggactttgccgtttattactgccaaagctatgacagctctttatctggcgtggtgttcggtcaaggtaccaaggtggaaattaaa

SEQ ID NO: 253 - DNA, 750 bp, synthetic construct
  source 1..750: mol_type = other DNA
caggtgcagttagttgaaagcggcggtggtgtggtgcaaccgggtcgtagcttacgtttatcttgcgcggcctctggctttacctttagcagctatgcgatgcattgggtgcgtcaggcgccaggtaagggcttagagtgggtggcggttatctcttatgacggtagcaacaagtactacgccgatagcgttaaaggccgcttcacgattagccgcgacaacagcaaaaataccttatacttacagatgaattctttacgcgccgaggatacggccgtttattattgtgccaaagacttaatctacacggcccaagattattggggtcaatggggccaaggcaccctggttacggttagcagcggcggctcttctcgctcttctagctctggtggcggcggctctggcggcggtggcgaaattgttctgacccaaagcccggcgaccctgagcctgagcccaggtgaacgcgccaccctgagctgtcgtgcctctcaaagcgtttcttctagctacctggcctggtatcaacagaaaccaggtcaggccccgcgcttactgatttatggtgcgtcttctcgcgcgacgggtatcccagcgcgtttttctggcagcggctctggcaccgatttcacgctgaccatttctcgcctggaaccagaggactttgccgtttattactgccaaagctatgacagctctttatctagcctggtggttttcggtcaaggcacgaaagtggaaatcaaa

SEQ ID NO: 254 - DNA, 741 bp, synthetic construct
  source 1..741: mol_type = other DNA
caggtgcagttagttgaaagcggcggtggtgtggtgcaaccgggtcgtagcttacgtttatcttgcgcggcctctggctttacctttagcagctatgcgatgcattgggtgcgtcaggcgccaggtaagggcttagagtgggtggcggttatctcttatgacggtagcaacaagtactacgccgatagcgttaaaggccgcttcacgattagccgcgacaacagcaaaaataccttatacttacagatgaattctttacgcgccgaggatacggccgtttattattgtgccaaagacttaatctacacggcccaagattattggggtcaatggggccaaggcaccctggttacggttagcagcggcggctcttctcgctcttctagctctggtggcggcggctctggcggcggtggcgaaattgttctgacccaaagcccggcgaccctgagcctgagcccaggtgaacgcgccaccctgagctgtcgtgcctctcaaagcgtttcttctagctacctggcctggtatcaacagaaaccaggtcaggccccgcgcttactgatttatggtgcgtcttctcgcgcgacgggtatcccagcgcgtttttctggcagcggctctggcaccgatttcacgctgaccatttctcgcctggaaccagaggactttgccgtttattactgccaaacctgggattcttttggtcaagtttttggccagggtacgaaggttgaaatcaaa

SEQ ID NO: 255 - DNA, 747 bp, synthetic construct
  source 1..747: mol_type = other DNA
caggtgcagttagttgaaagcggcggtggtgtggtgcaaccgggtcgtagcttacgtttatcttgcgcggcctctggctttacctttagcagctatgcgatgcattgggtgcgtcaggcgccaggtaagggcttagagtgggtggcggttatctcttatgacggtagcaacaagtactacgccgatagcgttaaaggccgcttcacgattagccgcgacaacagcaaaaataccttatacttacagatgaattctttacgcgccgaggatacggccgtttattattgtgccaaagacttaatctacacggcccaagattattggggtcaatggggccaaggcaccctggttacggttagcagcggcggctcttctcgctcttctagctctggtggcggcggctctggcggcggtggcgaaattgttctgacccaaagcccggcgaccctgagcctgagcccaggtgaacgcgccaccctgagctgtcgtgcctctcaaagcgtttcttctagctacctggcctggtatcaacagaaaccaggtcaggccccgcgcttactgatttatggtgcgtcttctcgcgcgacgggtatcccagcgcgtttttctggcagcggctctggcaccgatttcacgctgaccatttctcgcctggaaccagaggactttgccgtttattactgccaagtgtgggattctagctctgaccaaggcgtgtttggtcaaggtacgaaagttgaaattaaa

SEQ ID NO: 256 - DNA, 744 bp, synthetic construct
  source 1..744: mol_type = other DNA
caggtgcagttagttgaaagcggcggtggtgtggtgcaaccgggtcgtagcttacgtttatcttgcgcggcctctggctttacctttagcagctatgcgatgcattgggtgcgtcaggcgccaggtaagggcttagagtgggtggcggttatctcttatgacggtagcaacaagtactacgccgatagcgttaaaggccgcttcacgattagccgcgacaacagcaaaaataccttatacttacagatgaattctttacgcgccgaggatacggccgtttattattgtgccaaagacttaccaggtacgatgtctttcgattattggggtcaatggggccaaggcaccctggttacggttagcagcggcggctcttctcgctcttctagctctggtggcggcggctctggcggcggtggcgaaattgttctgacccaaagcccggcgaccctgagcctgagcccaggtgaacgcgccaccctgagctgtcgtgcctctcaaagcgtttcttctagctacctggcctggtatcaacagaaaccaggtcaggccccgcgcttactgatttatggtgcgtcttctcgcgcgacgggtatcccagcgcgtttttctggcagcggctctggcaccgatttcacgctgaccatttctcgcctggaaccagaggactttgccgtttattactgccaacagcgttctaattggccatggacgttcggccagggcacgaaggttgagattaaa

SEQ ID NO: 257 - DNA, 750 bp, synthetic construct
  source 1..750: mol_type = other DNA
caggtgcagttagttgaaagcggcggtggtgtggtgcaaccgggtcgtagcttacgtttatcttgcgcggcctctggctttacctttagcagctatgcgatgcattgggtgcgtcaggcgccaggtaagggcttagagtgggtggcggttatctcttatgacggtagcaacaagtactacgccgatagcgttaaaggccgcttcacgattagccgcgacaacagcaaaaataccttatacttacagatgaattctttacgcgccgaggatacggccgtttattattgtgccaaagacttacgcttctctggtgtttttgattactggggtcagtggggtcagggcaccttagttacggtgagcagcggcggttcttctcgctctagctcttctggcggcggcggtagcggcggtggcggcgaaatcgtgctgacgcagagcccggcgaccctgagcctgtctccaggcgagcgcgcgaccctgtcttgccgcgcctctcagtctgtttctagctcttatttagcgtggtaccagcagaagccaggccaagcgccacgcctgctgatttacggcgcctcttctcgtgccacgggtatcccggcgcgtttcagcggcagcggtagcggcaccgacttcaccctgaccatctctcgtctggagccagaggatttcgccgtgtactattgtcaggtgtgggaccgttcttctgaccagtatgtgttcggtcaaggtaccaaggtggaaattaaa

SEQ ID NO: 258 - DNA, 765 bp, synthetic construct
  source 1..765: mol_type = other DNA
caggtgcagttagttgaaagcggcggtggtgtggtgcaaccgggtcgtagcttacgtttatcttgcgcggcctctggctttacctttagcagctatgcgatgcattgggtgcgtcaggcgccaggtaagggcttagagtgggtggcggttatctcttatgacggtagcaacaagtactacgccgatagcgttaaaggccgcttcacgattagccgcgacaacagcaaaaataccttatacttacagatgaattctttacgcgccgaggatacggccgtttattattgtgccaaagacttacgctggaacaacgttaacaatgattcttacggcatggacgtgtggggccagtggggtcaaggtaccctggtgaccgtttcttctggtggtagctctcgcagcagcagctctggcggcggtggcagcggcggtggcggcgagattgtgctgacccagagcccggcgacgttaagcttatctccgggcgaacgcgcgacgttatcttgccgcgcctctcagtctgtgtctagctcttatctggcctggtaccagcaaaaaccaggtcaggcgccgcgcctgttaatctacggcgcctcttctcgcgcgaccggcatcccggcgcgtttcagcggcagcggttctggcaccgatttcacgctgaccatctctcgcctggagccagaagactttgccgtgtattactgccaagcctgggacagcagcggcgccgttgttttcggccaaggcaccaaagttgagatcaaa

SEQ ID NO: 259 - DNA, 747 bp, synthetic construct
  source 1..747: mol_type = other DNA
caggtgcagttagttgaaagcggcggtggtgtggtgcaaccgggtcgtagcttacgtttatcttgcgcggcctctggctttacctttagcagctatgcgatgcattgggtgcgtcaggcgccaggtaagggcttagagtgggtggcggttatctcttatgacggtagcaacaagtactacgccgatagcgttaaaggccgcttcacgattagccgcgacaacagcaaaaataccttatacttacagatgaattctttacgcgccgaggatacggccgtttattattgtgccaaagacttaacgttcgcccgcgccctggattactggggtcagtggggtcagggcaccttagttacggtgagcagcggcggttcttctcgctctagctcttctggcggcggcggtagcggcggtggcggcgaaatcgtgctgacgcagagcccggcgaccctgagcctgtctccaggcgagcgcgcgaccctgtcttgccgcgcctctcagtctgtttctagctcttatttagcgtggtaccagcagaagccaggccaagcgccacgcctgctgatttacggcgcctcttctcgtgccacgggtatcccggcgcgtttcagcggcagcggtagcggcaccgacttcaccctgaccatctctcgtctggagccagaggatttcgccgtgtactattgtgaaaccggtgattctaacaacctggtggtgttcggtcaaggtaccaaggtggaaattaaa

SEQ ID NO: 260 - DNA, 750 bp, synthetic construct
  source 1..750: mol_type = other DNA
caggtgcagttagttgaaagcggcggtggtgtggtgcaaccgggtcgtagcttacgtttatcttgcgcggcctctggctttacctttagcagctatgcgatgcattgggtgcgtcaggcgccaggtaagggcttagagtgggtggcggttatctcttatgacggtagcaacaagtactacgccgatagcgttaaaggccgcttcacgattagccgcgacaacagcaaaaataccttatacttacagatgaattctttacgcgccgaggatacggccgtttattattgtgccaaagacttaacgttcgcccgcgccctggattactggggtcagtggggtcagggcaccttagttacggtgagcagcggcggttcttctcgctctagctcttctggcggcggcggtagcggcggtggcggcgaaatcgtgctgacgcagagcccggcgaccctgagcctgtctccaggcgagcgcgcgaccctgtcttgccgcgcctctcagtctgtttctagctcttatttagcgtggtaccagcagaagccaggccaagcgccacgcctgctgatttacggcgcctcttctcgtgccacgggtatcccggcgcgtttcagcggcagcggtagcggcaccgacttcaccctgaccatctctcgtctggagccagaggatttcgccgtgtactattgtcaggcgtgggacagctcttctccatatgtggtgttcggtcaaggtaccaaggtggaaattaaa

SEQ ID NO: 261 - DNA, 744 bp, synthetic construct
  source 1..744: mol_type = other DNA
caggtgcagttagttgaaagcggcggtggtgtggtgcaaccgggtcgtagcttacgtttatcttgcgcggcctctggctttacctttagcagctatgcgatgcattgggtgcgtcaggcgccaggtaagggcttagagtgggtggcggttatctcttatgacggtagcaacaagtactacgccgatagcgttaaaggccgcttcacgattagccgcgacaacagcaaaaataccttatacttacagatgaattctttacgcgccgaggatacggccgtttattattgtgccaaagacttaacgttcgcccgcgccctggattactggggtcagtggggtcagggcaccttagttacggtgagcagcggcggttcttctcgctctagctcttctggcggcggcggtagcggcggtggcggcgaaatcgtgctgacgcagagcccggcgaccctgagcctgtctccaggcgagcgcgcgaccctgtcttgccgcgcctctcagtctgtttctagctcttatttagcgtggtaccagcagaagccaggccaagcgccacgcctgctgatttacggcgcctcttctcgtgccacgggtatcccggcgcgtttcagcggcagcggtagcggcaccgacttcaccctgaccatctctcgtctggagccagaggatttcgccgtgtactattgtcaggcgtgggacacctctacgtgggtttttggccagggtacgaaggttgaaatcaaa

SEQ ID NO: 262 - DNA, 744 bp, synthetic construct
  source 1..744: mol_type = other DNA
caggtgcagttagttgaaagcggcggtggtgtggtgcaaccgggtcgtagcttacgtttatcttgcgcggcctctggctttacctttagcagctatgcgatgcattgggtgcgtcaggcgccaggtaagggcttagagtgggtggcggttatctcttatgacggtagcaacaagtactacgccgatagcgttaaaggccgcttcacgattagccgcgacaacagcaaaaataccttatacttacagatgaattctttacgcgccgaggatacggccgtttattattgtgccaaagacttaacgttcgcccgcgccctggattactggggtcagtggggtcagggcaccttagttacggtgagcagcggcggttcttctcgctctagctcttctggcggcggcggtagcggcggtggcggcgaaatcgtgctgacgcagagcccggcgaccctgagcctgtctccaggcgagcgcgcgaccctgtcttgccgcgcctctcagtctgtttctagctcttatttagcgtggtaccagcagaagccaggccaagcgccacgcctgctgatttacggcgcctcttctcgtgccacgggtatcccggcgcgtttcagcggcagcggtagcggcaccgacttcaccctgaccatctctcgtctggagccagaggatttcgccgtgtactattgtcagcagcgcaaaaacaacccacgtacctttggtcaaggtacgaaagttgaaattaaa

SEQ ID NO: 263 - DNA, 747 bp, synthetic construct
  source 1..747: mol_type = other DNA
caggtgcagttagttgaaagcggcggtggtgtggtgcaaccgggtcgtagcttacgtttatcttgcgcggcctctggctttacctttagcagctatgcgatgcattgggtgcgtcaggcgccaggtaagggcttagagtgggtggcggttatctcttatgacggtagcaacaagtactacgccgatagcgttaaaggccgcttcacgattagccgcgacaacagcaaaaataccttatacttacagatgaattctttacgcgccgaggatacggccgtttattattgtgccaaagacttaacgttcgcccgcgccctggattactggggtcagtggggtcagggcaccttagttacggtgagcagcggcggttcttctcgctctagctcttctggcggcggcggtagcggcggtggcggcgaaatcgtgctgacgcagagcccggcgaccctgagcctgtctccaggcgagcgcgcgaccctgtcttgccgcgcctctcagtctgtttctagctcttatttagcgtggtaccagcagaagccaggccaagcgccacgcctgctgatttacggcgcctcttctcgtgccacgggtatcccggcgcgtttcagcggcagcggtagcggcaccgacttcaccctgaccatctctcgtctggagccagaggatttcgccgtgtactattgtcagcagcgcagcaactggccaccactgacctttggtcaaggtacgaaagttgaaattaaa

SEQ ID NO: 264 - DNA, 747 bp, synthetic construct
  source 1..747: mol_type = other DNA
caggtgcagttagttgaaagcggcggtggtgtggtgcaaccgggtcgtagcttacgtttatcttgcgcggcctctggctttacctttagcagctatgcgatgcattgggtgcgtcaggcgccaggtaagggcttagagtgggtggcggttatctcttatgacggtagcaacaagtactacgccgatagcgttaaaggccgcttcacgattagccgcgacaacagcaaaaataccttatacttacagatgaattctttacgcgccgaggatacggccgtttattattgtgccaaagacttaacgttcgcccgcgccctggattactggggtcagtggggtcagggcaccttagttacggtgagcagcggcggttcttctcgctctagctcttctggcggcggcggtagcggcggtggcggcgaaatcgtgctgacgcagagcccggcgaccctgagcctgtctccaggcgagcgcgcgaccctgtcttgccgcgcctctcagtctgtttctagctcttatttagcgtggtaccagcagaagccaggccaagcgccacgcctgctgatttacggcgcctcttctcgtgccacgggtatcccggcgcgtttcagcggcagcggtagcggcaccgacttcaccctgaccatctctcgtctggagccagaggatttcgccgtgtactattgtcagcagtctagctctttctctccgtataccttcggtcaaggtaccaaggtggaaattaaa

SEQ ID NO: 265 - DNA, 744 bp, synthetic construct
  source 1..744: mol_type = other DNA
caggtgcagttagttgaaagcggcggtggtgtggtgcaaccgggtcgtagcttacgtttatcttgcgcggcctctggctttacctttagcagctatgcgatgcattgggtgcgtcaggcgccaggtaagggcttagagtgggtggcggttatctcttatgacggtagcaacaagtactacgccgatagcgttaaaggccgcttcacgattagccgcgacaacagcaaaaataccttatacttacagatgaattctttacgcgccgaggatacggccgtttattattgtgccaaagacttaacgttcgcccgcgccctggattactggggtcagtggggtcagggcaccttagttacggtgagcagcggcggttcttctcgctctagctcttctggcggcggcggtagcggcggtggcggcgaaatcgtgctgacgcagagcccggcgaccctgagcctgtctccaggcgagcgcgcgaccctgtcttgccgcgcctctcagtctgtttctagctcttatttagcgtggtaccagcagaagccaggccaagcgccacgcctgctgatttacggcgcctcttctcgtgccacgggtatcccggcgcgtttcagcggcagcggtagcggcaccgacttcaccctgaccatctctcgtctggagccagaggatttcgccgtgtactattgtcagcagtcttattctccaccaattacctttggtcaaggtacgaaagttgaaattaaa

SEQ ID NO: 266 - DNA, 744 bp, synthetic construct
  source 1..744: mol_type = other DNA
caggtgcagttagttgaaagcggcggtggtgtggtgcaaccgggtcgtagcttacgtttatcttgcgcggcctctggctttacctttagcagctatgcgatgcattgggtgcgtcaggcgccaggtaagggcttagagtgggtggcggttatctcttatgacggtagcaacaagtactacgccgatagcgttaaaggccgcttcacgattagccgcgacaacagcaaaaataccttatacttacagatgaattctttacgcgccgaggatacggccgtttattattgtgccaaagacttaacgttcgcccgcgccctggattactggggtcagtggggtcagggcaccttagttacggtgagcagcggcggttcttctcgctctagctcttctggcggcggcggtagcggcggtggcggcgaaatcgtgctgacgcagagcccggcgaccctgagcctgtctccaggcgagcgcgcgaccctgtcttgccgcgcctctcagtctgtttctagctcttatttagcgtggtaccagcagaagccaggccaagcgccacgcctgctgatttacggcgcctcttctcgtgccacgggtatcccggcgcgtttcagcggcagcggtagcggcaccgacttcaccctgaccatctctcgtctggagccagaggatttcgccgtgtactattgtcagcagtcttattctccaccaccgacctttggtcaaggtacgaaagttgaaattaaa

SEQ ID NO: 267 - DNA, 744 bp, synthetic construct
  source 1..744: mol_type = other DNA
caggtgcagttagttgaaagcggcggtggtgtggtgcaaccgggtcgtagcttacgtttatcttgcgcggcctctggctttacctttagcagctatgcgatgcattgggtgcgtcaggcgccaggtaagggcttagagtgggtggcggttatctcttatgacggtagcaacaagtactacgccgatagcgttaaaggccgcttcacgattagccgcgacaacagcaaaaataccttatacttacagatgaattctttacgcgccgaggatacggccgtttattattgtgccaaagacttaacgttcgcccgcgccctggattactggggtcagtggggtcagggcaccttagttacggtgagcagcggcggttcttctcgctctagctcttctggcggcggcggtagcggcggtggcggcgaaatcgtgctgacgcagagcccggcgaccctgagcctgtctccaggcgagcgcgcgaccctgtcttgccgcgcctctcagtctgtttctagctcttatttagcgtggtaccagcagaagccaggccaagcgccacgcctgctgatttacggcgcctcttctcgtgccacgggtatcccggcgcgtttcagcggcagcggtagcggcaccgacttcaccctgaccatctctcgtctggagccagaggatttcgccgtgtactattgtcagcagtcttattctacgttatatacctttggtcaaggtacgaaagttgaaattaaa

SEQ ID NO: 268 - DNA, 744 bp, synthetic construct
  source 1..744: mol_type = other DNA
caggtgcagttagttgaaagcggcggtggtgtggtgcaaccgggtcgtagcttacgtttatcttgcgcggcctctggctttacctttagcagctatgcgatgcattgggtgcgtcaggcgccaggtaagggcttagagtgggtggcggttatctcttatgacggtagcaacaagtactacgccgatagcgttaaaggccgcttcacgattagccgcgacaacagcaaaaataccttatacttacagatgaattctttacgcgccgaggatacggccgtttattattgtgccaaagacttaacgttcgcccgcgccctggattactggggtcagtggggtcagggcaccttagttacggtgagcagcggcggttcttctcgctctagctcttctggcggcggcggtagcggcggtggcggcgaaatcgtgctgacgcagagcccggcgaccctgagcctgtctccaggcgagcgcgcgaccctgtcttgccgcgcctctcagtctgtttctagctcttatttagcgtggtaccagcagaagccaggccaagcgccacgcctgctgatttacggcgcctcttctcgtgccacgggtatcccggcgcgtttcagcggcagcggtagcggcaccgacttcaccctgaccatctctcgtctggagccagaggatttcgccgtgtactattgtcagcagtacgattctacgttatggacctttggccaaggtacgaaggtggagattaaa

SEQ ID NO: 269 - DNA, 747 bp, synthetic construct
  source 1..747: mol_type = other DNA
caggtgcagttagttgaaagcggcggtggtgtggtgcaaccgggtcgtagcttacgtttatcttgcgcggcctctggctttacctttagcagctatgcgatgcattgggtgcgtcaggcgccaggtaagggcttagagtgggtggcggttatctcttatgacggtagcaacaagtactacgccgatagcgttaaaggccgcttcacgattagccgcgacaacagcaaaaataccttatacttacagatgaattctttacgcgccgaggatacggccgtttattattgtgccaaagacttaacgttcgcccgcgccctggattactggggtcagtggggtcagggcaccttagttacggtgagcagcggcggttcttctcgctctagctcttctggcggcggcggtagcggcggtggcggcgaaatcgtgctgacgcagagcccggcgaccctgagcctgtctccaggcgagcgcgcgaccctgtcttgccgcgcctctcagtctgtttctagctcttatttagcgtggtaccagcagaagccaggccaagcgccacgcctgctgatttacggcgcctcttctcgtgccacgggtatcccggcgcgtttcagcggcagcggtagcggcaccgacttcaccctgaccatctctcgtctggagccagaggatttcgccgtgtactattgtcagcagtacggctcttctccactgattagcttcggtcaaggtaccaaggtggaaattaaa

SEQ ID NO: 270 - DNA, 741 bp, synthetic construct
  source 1..741: mol_type = other DNA
caggtgcagttagttgaaagcggcggtggtgtggtgcaaccgggtcgtagcttacgtttatcttgcgcggcctctggctttacctttagcagctatgcgatgcattgggtgcgtcaggcgccaggtaagggcttagagtgggtggcggttatctcttatgacggtagcaacaagtactacgccgatagcgttaaaggccgcttcacgattagccgcgacaacagcaaaaataccttatacttacagatgaattctttacgcgccgaggatacggccgtttattattgtgccaaagacttaacgttcgcccgcgccctggattactggggtcagtggggtcagggcaccttagttacggtgagcagcggcggttcttctcgctctagctcttctggcggcggcggtagcggcggtggcggcgaaatcgtgctgacgcagagcccggcgaccctgagcctgtctccaggcgagcgcgcgaccctgtcttgccgcgcctctcagtctgtttctagctcttatttagcgtggtaccagcagaagccaggccaagcgccacgcctgctgatttacggcgcctcttctcgtgccacgggtatcccggcgcgtttcagcggcagcggtagcggcaccgacttcaccctgaccatctctcgtctggagccagaggatttcgccgtgtactattgtcagcagtacaatggtttacgcacctttggccaaggtacgaaggtggagattaaa

SEQ ID NO: 271 - DNA, 744 bp, synthetic construct
  source 1..744: mol_type = other DNA
caggtgcagttagttgaaagcggcggtggtgtggtgcaaccgggtcgtagcttacgtttatcttgcgcggcctctggctttacctttagcagctatgcgatgcattgggtgcgtcaggcgccaggtaagggcttagagtgggtggcggttatctcttatgacggtagcaacaagtactacgccgatagcgttaaaggccgcttcacgattagccgcgacaacagcaaaaataccttatacttacagatgaattctttacgcgccgaggatacggccgtttattattgtgccaaagacttaacgttcgcccgcgccctggattactggggtcagtggggtcagggcaccttagttacggtgagcagcggcggttcttctcgctctagctcttctggcggcggcggtagcggcggtggcggcgaaatcgtgctgacgcagagcccggcgaccctgagcctgtctccaggcgagcgcgcgaccctgtcttgccgcgcctctcagtctgtttctagctcttatttagcgtggtaccagcagaagccaggccaagcgccacgcctgctgatttacggcgcctcttctcgtgccacgggtatcccggcgcgtttcagcggcagcggtagcggcaccgacttcaccctgaccatctctcgtctggagccagaggatttcgccgtgtactattgtcagcagtacaattctttcccactgacctttggtcaaggtacgaaagttgaaattaaa

SEQ ID NO: 272 - DNA, 744 bp, synthetic construct
  source 1..744: mol_type = other DNA
caggtgcagttagttgaaagcggcggtggtgtggtgcaaccgggtcgtagcttacgtttatcttgcgcggcctctggctttacctttagcagctatgcgatgcattgggtgcgtcaggcgccaggtaagggcttagagtgggtggcggttatctcttatgacggtagcaacaagtactacgccgatagcgttaaaggccgcttcacgattagccgcgacaacagcaaaaataccttatacttacagatgaattctttacgcgccgaggatacggccgtttattattgtgccaaagacttaacgttcgcccgcgccctggattactggggtcagtggggtcagggcaccttagttacggtgagcagcggcggttcttctcgctctagctcttctggcggcggcggtagcggcggtggcggcgaaatcgtgctgacgcagagcccggcgaccctgagcctgtctccaggcgagcgcgcgaccctgtcttgccgcgcctctcagtctgtttctagctcttatttagcgtggtaccagcagaagccaggccaagcgccacgcctgctgatttacggcgcctcttctcgtgccacgggtatcccggcgcgtttcagcggcagcggtagcggcaccgacttcaccctgaccatctctcgtctggagccagaggatttcgccgtgtactattgtcagacctgggacagcttcggtcaagtgtttggccaaggtacgaaggtggagattaaa

SEQ ID NO: 273 - DNA, 753 bp, synthetic construct
  source 1..753: mol_type = other DNA
caggtgcagttagttgaaagcggcggtggtgtggtgcaaccgggtcgtagcttacgtttatcttgcgcggcctctggctttacctttagcagctatgcgatgcattgggtgcgtcaggcgccaggtaagggcttagagtgggtggcggttatctcttatgacggtagcaacaagtactacgccgatagcgttaaaggccgcttcacgattagccgcgacaacagcaaaaataccttatacttacagatgaattctttacgcgccgaggatacggccgtttattattgtgccaaagacttaacgttcgcccgcgccctggattactggggtcagtggggtcagggcaccttagttacggtgagcagcggcggttcttctcgctctagctcttctggcggcggcggtagcggcggtggcggcgaaatcgtgctgacgcagagcccggcgaccctgagcctgtctccaggcgagcgcgcgaccctgtcttgccgcgcctctcagtctgtttctagctcttatttagcgtggtaccagcagaagccaggccaagcgccacgcctgctgatttacggcgcctcttctcgtgccacgggtatcccggcgcgtttcagcggcagcggtagcggcaccgacttcaccctgaccatctctcgtctggagccagaggatttcgccgtgtactattgtcaggtgtgggacagctctgactctgatcatgtggttttcggtcaaggcacgaaagtggaaatcaaa

SEQ ID NO: 274 - DNA, 750 bp, synthetic construct
  source 1..750: mol_type = other DNA
caggtgcagttagttgaaagcggcggtggtgtggtgcaaccgggtcgtagcttacgtttatcttgcgcggcctctggctttacctttagcagctatgcgatgcattgggtgcgtcaggcgccaggtaagggcttagagtgggtggcggttatctcttatgacggtagcaacaagtactacgccgatagcgttaaaggccgcttcacgattagccgcgacaacagcaaaaataccttatacttacagatgaattctttacgcgccgaggatacggccgtttattattgtgccaaagacttaacgttcgcccgcgccctggattactggggtcagtggggtcagggcaccttagttacggtgagcagcggcggttcttctcgctctagctcttctggcggcggcggtagcggcggtggcggcgaaatcgtgctgacgcagagcccggcgaccctgagcctgtctccaggcgagcgcgcgaccctgtcttgccgcgcctctcagtctgtttctagctcttatttagcgtggtaccagcagaagccaggccaagcgccacgcctgctgatttacggcgcctcttctcgtgccacgggtatcccggcgcgtttcagcggcagcggtagcggcaccgacttcaccctgaccatctctcgtctggagccagaggatttcgccgtgtactattgtcaggtgtgggacagctcttctggtgatcaggtgttcggtcaaggtaccaaggtggaaattaaa

SEQ ID NO: 275 - DNA, 747 bp, synthetic construct
  source 1..747: mol_type = other DNA
caggtgcagttagttgaaagcggcggtggtgtggtgcaaccgggtcgtagcttacgtttatcttgcgcggcctctggctttacctttagcagctatgcgatgcattgggtgcgtcaggcgccaggtaagggcttagagtgggtggcggttatctcttatgacggtagcaacaagtactacgccgatagcgttaaaggccgcttcacgattagccgcgacaacagcaaaaataccttatacttacagatgaattctttacgcgccgaggatacggccgtttattattgtgccaaagacttaacgttcgcccgcgccctggattactggggtcagtggggtcagggcaccttagttacggtgagcagcggcggttcttctcgctctagctcttctggcggcggcggtagcggcggtggcggcgaaatcgtgctgacgcagagcccggcgaccctgagcctgtctccaggcgagcgcgcgaccctgtcttgccgcgcctctcagtctgtttctagctcttatttagcgtggtaccagcagaagccaggccaagcgccacgcctgctgatttacggcgcctcttctcgtgccacgggtatcccggcgcgtttcagcggcagcggtagcggcaccgacttcaccctgaccatctctcgtctggagccagaggatttcgccgtgtactattgtcagtattacggctcttacccactgtatgcgttcggtcaaggtaccaaggtggaaattaaa

SEQ ID NO: 276 - DNA, 750 bp, synthetic construct
  source 1..750: mol_type = other DNA
caggtgcagttagttgaaagcggcggtggtgtggtgcaaccgggtcgtagcttacgtttatcttgcgcggcctctggctttacctttagcagctatgcgatgcattgggtgcgtcaggcgccaggtaagggcttagagtgggtggcggttatctcttatgacggtagcaacaagtactacgccgatagcgttaaaggccgcttcacgattagccgcgacaacagcaaaaataccttatacttacagatgaattctttacgcgccgaggatacggccgtttattattgtgccaaagacttaacgttcgcccgcgccctggattactggggtcagtggggtcagggcaccttagttacggtgagcagcggcggttcttctcgctctagctcttctggcggcggcggtagcggcggtggcggcgaaatcgtgctgacgcagagcccggcgaccctgagcctgtctccaggcgagcgcgcgaccctgtcttgccgcgcctctcagtctgtttctagctcttatttagcgtggtaccagcagaagccaggccaagcgccacgcctgctgatttacggcgcctcttctcgtgccacgggtatcccggcgcgtttcagcggcagcggtagcggcaccgacttcaccctgaccatctctcgtctggagccagaggatttcgccgtgtactattgtagcagctacagcggttcttctaccttttgggtgttcggtcaaggtaccaaggtggaaattaaa

SEQ ID NO: 277 - DNA, 741 bp, synthetic construct
  source 1..741: mol_type = other DNA
caggtgcagttagttgaaagcggcggtggtgtggtgcaaccgggtcgtagcttacgtttatcttgcgcggcctctggctttacctttagcagctatgcgatgcattgggtgcgtcaggcgccaggtaagggcttagagtgggtggcggttatctcttatgacggtagcaacaagtactacgccgatagcgttaaaggccgcttcacgattagccgcgacaacagcaaaaataccttatacttacagatgaattctttacgcgccgaggatacggccgtttattattgtgccaaagacttagttacgggttctttagattattggggtcaatggggccaaggcaccctggttacggttagcagcggcggctcttctcgctcttctagctctggtggcggcggctctggcggcggtggcgaaattgttctgacccaaagcccggcgaccctgagcctgagcccaggtgaacgcgccaccctgagctgtcgtgcctctcaaagcgtttcttctagctacctggcctggtatcaacagaaaccaggtcaggccccgcgcttactgatttatggtgcgtcttctcgcgcgacgggtatcccagcgcgtttttctggcagcggctctggcaccgatttcacgctgaccatttctcgcctggaaccagaggactttgccgtttattactgccaacagagctacattacgccatggacgtttggccagggtacgaaggttgaaatcaaa

SEQ ID NO: 278 - DNA, 741 bp, synthetic construct
  source 1..741: mol_type = other DNA
caggtgcagttagttgaaagcggcggtggtgtggtgcaaccgggtcgtagcttacgtttatcttgcgcggcctctggctttacctttagcagctatgcgatgcattgggtgcgtcaggcgccaggtaagggcttagagtgggtggcggttatctcttatgacggtagcaacaagtactacgccgatagcgttaaaggccgcttcacgattagccgcgacaacagcaaaaataccttatacttacagatgaattctttacgcgccgaggatacggccgtttattattgtgccaaagacttagttgttggtgccttagattattggggtcaatggggccaaggcaccctggttacggttagcagcggcggctcttctcgctcttctagctctggtggcggcggctctggcggcggtggcgaaattgttctgacccaaagcccggcgaccctgagcctgagcccaggtgaacgcgccaccctgagctgtcgtgcctctcaaagcgtttcttctagctacctggcctggtatcaacagaaaccaggtcaggccccgcgcttactgatttatggtgcgtcttctcgcgcgacgggtatcccagcgcgtttttctggcagcggctctggcaccgatttcacgctgaccatttctcgcctggaaccagaggactttgccgtttattactgccaacaggcgaacagcttcccatggacgtttggccagggtacgaaggttgaaatcaaa

SEQ ID NO: 279 - DNA, 744 bp, synthetic construct
  source 1..744: mol_type = other DNA
caggtgcagttagttgaaagcggcggtggtgtggtgcaaccgggtcgtagcttacgtttatcttgcgcggcctctggctttacctttagcagctatgcgatgcattgggtgcgtcaggcgccaggtaagggcttagagtgggtggcggttatctcttatgacggtagcaacaagtactacgccgatagcgttaaaggccgcttcacgattagccgcgacaacagcaaaaataccttatacttacagatgaattctttacgcgccgaggatacggccgtttattattgtgccaaagacttagttgttggtgccttagattattggggtcaatggggccaaggcaccctggttacggttagcagcggcggctcttctcgctcttctagctctggtggcggcggctctggcggcggtggcgaaattgttctgacccaaagcccggcgaccctgagcctgagcccaggtgaacgcgccaccctgagctgtcgtgcctctcaaagcgtttcttctagctacctggcctggtatcaacagaaaccaggtcaggccccgcgcttactgatttatggtgcgtcttctcgcgcgacgggtatcccagcgcgtttttctggcagcggctctggcaccgatttcacgctgaccatttctcgcctggaaccagaggactttgccgtttattactgccaacagcataagagctacccacactttacctttggtcaaggtacgaaagttgaaattaaa

SEQ ID NO: 280 - DNA, 738 bp, synthetic construct
  source 1..738: mol_type = other DNA
caggtgcagttagttgaaagcggcggtggtgtggtgcaaccgggtcgtagcttacgtttatcttgcgcggcctctggctttacctttagcagctatgcgatgcattgggtgcgtcaggcgccaggtaagggcttagagtgggtggcggttatctcttatgacggtagcaacaagtactacgccgatagcgttaaaggccgcttcacgattagccgcgacaacagcaaaaataccttatacttacagatgaattctttacgcgccgaggatacggccgtttattattgtgccaaagacttagttgttggtgccttagattattggggtcaatggggccaaggcaccctggttacggttagcagcggcggctcttctcgctcttctagctctggtggcggcggctctggcggcggtggcgaaattgttctgacccaaagcccggcgaccctgagcctgagcccaggtgaacgcgccaccctgagctgtcgtgcctctcaaagcgtttcttctagctacctggcctggtatcaacagaaaccaggtcaggccccgcgcttactgatttatggtgcgtcttctcgcgcgacgggtatcccagcgcgtttttctggcagcggctctggcaccgatttcacgctgaccatttctcgcctggaaccagaggactttgccgtttattactgccaacagtataagagccactctacgtttggccagggtacgaaggttgaaatcaaa

SEQ ID NO: 281 - DNA, 744 bp, synthetic construct
  source 1..744: mol_type = other DNA
caggtgcagttagttgaaagcggcggtggtgtggtgcaaccgggtcgtagcttacgtttatcttgcgcggcctctggctttacctttagcagctatgcgatgcattgggtgcgtcaggcgccaggtaagggcttagagtgggtggcggttatctcttatgacggtagcaacaagtactacgccgatagcgttaaaggccgcttcacgattagccgcgacaacagcaaaaataccttatacttacagatgaattctttacgcgccgaggatacggccgtttattattgtgccaaagacttatacgccatctctttatttgattactggggtcagtggggtcagggcaccttagttacggtgagcagcggcggttcttctcgctctagctcttctggcggcggcggtagcggcggtggcggcgaaatcgtgctgacgcagagcccggcgaccctgagcctgtctccaggcgagcgcgcgaccctgtcttgccgcgcctctcagtctgtttctagctcttatttagcgtggtaccagcagaagccaggccaagcgccacgcctgctgatttacggcgcctcttctcgtgccacgggtatcccggcgcgtttcagcggcagcggtagcggcaccgacttcaccctgaccatctctcgtctggagccagaggatttcgccgtgtactattgtcaggcgtgggacagccgcacgtgggtttttggccagggtacgaaggttgaaatcaaa

SEQ ID NO: 282 - DNA, 768 bp, synthetic construct
  source 1..768: mol_type = other DNA
caggtgcagttagttgaaagcggcggtggtgtggtgcaaccgggtcgtagcttacgtttatcttgcgcggcctctggctttacctttagcagctatgcgatgcattgggtgcgtcaggcgccaggtaagggcttagagtgggtggcggttatctcttatgacggtagcaacaagtactacgccgatagcgttaaaggccgcttcacgattagccgcgacaacagcaaaaataccttatacttacagatgaattctttacgcgccgaggatacggccgtttattattgtgccaaagaccaagagggttaccgcgcctatggctacaacggcatggacgtgtggggccagtggggtcaaggtaccctggtgaccgtttcttctggtggtagctctcgcagcagcagctctggcggcggtggcagcggcggtggcggcgagattgtgctgacccagagcccggcgacgttaagcttatctccgggcgaacgcgcgacgttatcttgccgcgcctctcagtctgtgtctagctcttatctggcctggtaccagcaaaaaccaggtcaggcgccgcgcctgttaatctacggcgcctcttctcgcgcgaccggcatcccggcgcgtttcagcggcagcggttctggcaccgatttcacgctgaccatctctcgcctggagccagaagactttgccgtgtattactgcggtacgtgggacagcagcctgtctggtaactgggtttttggtcagggcaccaaggttgagattaaa

SEQ ID NO: 283 - DNA, 759 bp, synthetic construct
  source 1..759: mol_type = other DNA
caggtgcagttagttgaaagcggcggtggtgtggtgcaaccgggtcgtagcttacgtttatcttgcgcggcctctggctttacctttagcagctatgcgatgcattgggtgcgtcaggcgccaggtaagggcttagagtgggtggcggttatctcttatgacggtagcaacaagtactacgccgatagcgttaaaggccgcttcacgattagccgcgacaacagcaaaaataccttatacttacagatgaattctttacgcgccgaggatacggccgtttattattgtgccaaagaccaagagggttaccgcgcctatggctacaacggcatggacgtgtggggccagtggggtcaaggtaccctggtgaccgtttcttctggtggtagctctcgcagcagcagctctggcggcggtggcagcggcggtggcggcgagattgtgctgacccagagcccggcgacgttaagcttatctccgggcgaacgcgcgacgttatcttgccgcgcctctcagtctgtgtctagctcttatctggcctggtaccagcaaaaaccaggtcaggcgccgcgcctgttaatctacggcgcctcttctcgcgcgaccggcatcccggcgcgtttcagcggcagcggttctggcaccgatttcacgctgaccatctctcgcctggagccagaagactttgccgtgtattactgcatgcaaggtgcccattggccgtgggcgttcggtcaaggtaccaaggtggaaattaaa

SEQ ID NO: 284 - DNA, 744 bp, synthetic construct
  source 1..744: mol_type = other DNA
caggtgcagttagttgaaagcggcggtggtgtggtgcaaccgggtcgtagcttacgtttatcttgcgcggcctctggctttacctttagcagctatgcgatgcattgggtgcgtcaggcgccaggtaagggcttagagtgggtggcggttatctcttatgacggtagcaacaagtactacgccgatagcgttaaaggccgcttcacgattagccgcgacaacagcaaaaataccttatacttacagatgaattctttacgcgccgaggatacggccgtttattattgtgccaaagaccgccgccacacgcgcggtacctggggccaatggggtcagggtaccctggtgacggtttctagcggcggcagctctcgctcttcttctagcggtggtggcggcagcggtggcggcggtgaaattgtgttaacccagtctccggcgaccctgagcctgagcccgggtgagcgtgccacgctgagctgccgcgcgtctcaatctgtgtcttcttcttatttagcgtggtaccagcaaaaaccgggtcaagcgccacgtttattaatttatggcgccagctctcgcgccaccggtatcccagcccgttttagcggtagcggcagcggtaccgattttacgttaaccattagccgcttagaaccggaggacttcgcggtttactattgtacctcttatacctctagctctgagttatatgcgtttggtcaaggtacgaaagttgaaattaaa

SEQ ID NO: 285 - DNA, 750 bp, synthetic construct
  source 1..750: mol_type = other DNA
caggtgcagttagttgaaagcggcggtggtgtggtgcaaccgggtcgtagcttacgtttatcttgcgcggcctctggctttacctttagcagctatgcgatgcattgggtgcgtcaggcgccaggtaagggcttagagtgggtggcggttatctcttatgacggtagcaacaagtactacgccgatagcgttaaaggccgcttcacgattagccgcgacaacagcaaaaataccttatacttacagatgaattctttacgcgccgaggatacggccgtttattattgtgccaaagaccgctctgttgttccaacgtattatttcgactattggggtcagtggggccagggtacgttagtgaccgtgagctctggtggttcttctcgttcttctagcagcggcggtggcggctctggcggcggcggtgaaattgttctgacccagagcccggcgaccctgtctttaagcccaggtgaacgtgcgacgctgtcttgtcgcgcgtctcaatctgtgtctagctcttatttagcgtggtatcaacaaaaaccaggccaagccccgcgtctgttaatttacggtgccagctctcgcgccacgggcattccggcccgttttagcggtagcggcagcggtacggattttaccttaacgattagccgcttagagccggaggactttgccgtgtactattgccaacagcgctctaactggccgccgagcttcggtcaaggtaccaaggtggaaattaaa

SEQ ID NO: 286 - DNA, 750 bp, synthetic construct
  source 1..750: mol_type = other DNA
caggtgcagttagttgaaagcggcggtggtgtggtgcaaccgggtcgtagcttacgtttatcttgcgcggcctctggctttacctttagcagctatgcgatgcattgggtgcgtcaggcgccaggtaagggcttagagtgggtggcggttatctcttatgacggtagcaacaagtactacgccgatagcgttaaaggccgcttcacgattagccgcgacaacagcaaaaataccttatacttacagatgaattctttacgcgccgaggatacggccgtttattattgtgccaaagactctggtacgcacggtacgtttgatatctggggtcagtggggtcagggcaccttagttacggtgagcagcggcggttcttctcgctctagctcttctggcggcggcggtagcggcggtggcggcgaaatcgtgctgacgcagagcccggcgaccctgagcctgtctccaggcgagcgcgcgaccctgtcttgccgcgcctctcagtctgtttctagctcttatttagcgtggtaccagcagaagccaggccaagcgccacgcctgctgatttacggcgcctcttctcgtgccacgggtatcccggcgcgtttcagcggcagcggtagcggcaccgacttcaccctgaccatctctcgtctggagccagaggatttcgccgtgtactattgtggcaccttagattctatcttacgtagctgggtgttcggtcaaggtaccaaggtggaaattaaa

SEQ ID NO: 287 - DNA, 768 bp, synthetic construct
  source 1..768: mol_type = other DNA
caggtgcagttagttgaaagcggcggtggtgtggtgcaaccgggtcgtagcttacgtttatcttgcgcggcctctggctttacctttagcagctatgcgatgcattgggtgcgtcaggcgccaggtaagggcttagagtgggtggcggttatctcttatgacggtagcaacaagtactacgccgatagcgttaaaggccgcttcacgattagccgcgacaacagcaaaaataccttatacttacagatgaattctttacgcgccgaggatacggccgtttattattgtgccaaagactggggttggtaccgcggttacggtcatgcgggtgccgtggacatttggggccagtggggtcaaggtaccctggtgaccgtttcttctggtggtagctctcgcagcagcagctctggcggcggtggcagcggcggtggcggcgagattgtgctgacccagagcccggcgacgttaagcttatctccgggcgaacgcgcgacgttatcttgccgcgcctctcagtctgtgtctagctcttatctggcctggtaccagcaaaaaccaggtcaggcgccgcgcctgttaatctacggcgcctcttctcgcgcgaccggcatcccggcgcgtttcagcggcagcggttctggcaccgatttcacgctgaccatctctcgcctggagccagaagactttgccgtgtattactgcgaggagtgggacgatagcctgaagggtcaagtttttggtcagggcaccaaggttgagattaaa

SEQ ID NO: 288 - DNA, 771 bp, synthetic construct
  source 1..771: mol_type = other DNA
caggtgcagttagttgaaagcggcggtggtgtggtgcaaccgggtcgtagcttacgtttatcttgcgcggcctctggctttacctttagcagctatgcgatgcattgggtgcgtcaggcgccaggtaagggcttagagtgggtggcggttatctcttatgacggtagcaacaagtactacgccgatagcgttaaaggccgcttcacgattagccgcgacaacagcaaaaataccttatacttacagatgaattctttacgcgccgaggatacggccgtttattattgtgccaaagactggggttggtaccgcggttacggtcatgcgggtgccgtggacatttggggccagtggggtcaaggtaccctggtgaccgtttcttctggtggtagctctcgcagcagcagctctggcggcggtggcagcggcggtggcggcgagattgtgctgacccagagcccggcgacgttaagcttatctccgggcgaacgcgcgacgttatcttgccgcgcctctcagtctgtgtctagctcttatctggcctggtaccagcaaaaaccaggtcaggcgccgcgcctgttaatctacggcgcctcttctcgcgcgaccggcatcccggcgcgtttcagcggcagcggttctggcaccgatttcacgctgaccatctctcgcctggagccagaagactttgccgtgtattactgcggtacgtgggacagcagcctgttaggtgccggtgtgttcggccagggcacgaaggttgaaatcaaa

SEQ ID NO: 289 - DNA, 768 bp, synthetic construct
  source 1..768: mol_type = other DNA
caggtgcagttagttgaaagcggcggtggtgtggtgcaaccgggtcgtagcttacgtttatcttgcgcggcctctggctttacctttagcagctatgcgatgcattgggtgcgtcaggcgccaggtaagggcttagagtgggtggcggttatctcttatgacggtagcaacaagtactacgccgatagcgttaaaggccgcttcacgattagccgcgacaacagcaaaaataccttatacttacagatgaattctttacgcgccgaggatacggccgtttattattgtgccaaagactggggttggtaccgcggttacggtcatgcgggtgccgtggacatttggggccagtggggtcaaggtaccctggtgaccgtttcttctggtggtagctctcgcagcagcagctctggcggcggtggcagcggcggtggcggcgagattgtgctgacccagagcccggcgacgttaagcttatctccgggcgaacgcgcgacgttatcttgccgcgcctctcagtctgtgtctagctcttatctggcctggtaccagcaaaaaccaggtcaggcgccgcgcctgttaatctacggcgcctcttctcgcgcgaccggcatcccggcgcgtttcagcggcagcggttctggcaccgatttcacgctgaccatctctcgcctggagccagaagactttgccgtgtattactgcggtacgtgggacagcagcctgcgcgccgttgtttttggtcagggcaccaaggttgagattaaa

SEQ ID NO: 290 - DNA, 768 bp, synthetic construct
  source 1..768: mol_type = other DNA
caggtgcagttagttgaaagcggcggtggtgtggtgcaaccgggtcgtagcttacgtttatcttgcgcggcctctggctttacctttagcagctatgcgatgcattgggtgcgtcaggcgccaggtaagggcttagagtgggtggcggttatctcttatgacggtagcaacaagtactacgccgatagcgttaaaggccgcttcacgattagccgcgacaacagcaaaaataccttatacttacagatgaattctttacgcgccgaggatacggccgtttattattgtgccaaagactggggttggtaccgcggttacggtcatgcgggtgccgtggacatttggggccagtggggtcaaggtaccctggtgaccgtttcttctggtggtagctctcgcagcagcagctctggcggcggtggcagcggcggtggcggcgagattgtgctgacccagagcccggcgacgttaagcttatctccgggcgaacgcgcgacgttatcttgccgcgcctctcagtctgtgtctagctcttatctggcctggtaccagcaaaaaccaggtcaggcgccgcgcctgttaatctacggcgcctcttctcgcgcgaccggcatcccggcgcgtttcagcggcagcggttctggcaccgatttcacgctgaccatctctcgcctggagccagaagactttgccgtgtattactgcggtgtttgggacagcagcggcgccgttgttgtttttggtcagggcaccaaggttgagattaaa

SEQ ID NO: 291 - DNA, 762 bp, synthetic construct
  source 1..762: mol_type = other DNA
caggtgcagttagttgaaagcggcggtggtgtggtgcaaccgggtcgtagcttacgtttatcttgcgcggcctctggctttacctttagcagctatgcgatgcattgggtgcgtcaggcgccaggtaagggcttagagtgggtggcggttatctcttatgacggtagcaacaagtactacgccgatagcgttaaaggccgcttcacgattagccgcgacaacagcaaaaataccttatacttacagatgaattctttacgcgccgaggatacggccgtttattattgtgccaaagactggggttggtaccgcggttacggtcatgcgggtgccgtggacatttggggccagtggggtcaaggtaccctggtgaccgtttcttctggtggtagctctcgcagcagcagctctggcggcggtggcagcggcggtggcggcgagattgtgctgacccagagcccggcgacgttaagcttatctccgggcgaacgcgcgacgttatcttgccgcgcctctcagtctgtgtctagctcttatctggcctggtaccagcaaaaaccaggtcaggcgccgcgcctgttaatctacggcgcctcttctcgcgcgaccggcatcccggcgcgtttcagcggcagcggttctggcaccgatttcacgctgaccatctctcgcctggagccagaagactttgccgtgtattactgcttacaacacaatagctatccatggacgttcggtcagggtaccaaagtggagatcaaa

SEQ ID NO: 292 - DNA, 768 bp, synthetic construct
  source 1..768: mol_type = other DNA
caggtgcagttagttgaaagcggcggtggtgtggtgcaaccgggtcgtagcttacgtttatcttgcgcggcctctggctttacctttagcagctatgcgatgcattgggtgcgtcaggcgccaggtaagggcttagagtgggtggcggttatctcttatgacggtagcaacaagtactacgccgatagcgttaaaggccgcttcacgattagccgcgacaacagcaaaaataccttatacttacagatgaattctttacgcgccgaggatacggccgtttattattgtgccaaagactggggttggtaccgcggttacggtcatgcgggtgccgtggacatttggggccagtggggtcaaggtaccctggtgaccgtttcttctggtggtagctctcgcagcagcagctctggcggcggtggcagcggcggtggcggcgagattgtgctgacccagagcccggcgacgttaagcttatctccgggcgaacgcgcgacgttatcttgccgcgcctctcagtctgtgtctagctcttatctggcctggtaccagcaaaaaccaggtcaggcgccgcgcctgttaatctacggcgcctcttctcgcgcgaccggcatcccggcgcgtttcagcggcagcggttctggcaccgatttcacgctgaccatctctcgcctggagccagaagactttgccgtgtattactgccaagcctgggacagcagcagcgaccacgttgtttttggtcagggcaccaaggttgagattaaa

SEQ ID NO: 293 - DNA, 768 bp, synthetic construct
  source 1..768: mol_type = other DNA
caggtgcagttagttgaaagcggcggtggtgtggtgcaaccgggtcgtagcttacgtttatcttgcgcggcctctggctttacctttagcagctatgcgatgcattgggtgcgtcaggcgccaggtaagggcttagagtgggtggcggttatctcttatgacggtagcaacaagtactacgccgatagcgttaaaggccgcttcacgattagccgcgacaacagcaaaaataccttatacttacagatgaattctttacgcgccgaggatacggccgtttattattgtgccaaagactggggttggtaccgcggttacggtcatgcgggtgccgtggacatttggggccagtggggtcaaggtaccctggtgaccgtttcttctggtggtagctctcgcagcagcagctctggcggcggtggcagcggcggtggcggcgagattgtgctgacccagagcccggcgacgttaagcttatctccgggcgaacgcgcgacgttatcttgccgcgcctctcagtctgtgtctagctcttatctggcctggtaccagcaaaaaccaggtcaggcgccgcgcctgttaatctacggcgcctcttctcgcgcgaccggcatcccggcgcgtttcagcggcagcggttctggcaccgatttcacgctgaccatctctcgcctggagccagaagactttgccgtgtattactgccaagcctgggacagcagcacctctcacgttgtttttggtcagggcaccaaggttgagattaaa

SEQ ID NO: 294 - DNA, 762 bp, synthetic construct
  source 1..762: mol_type = other DNA
caggtgcagttagttgaaagcggcggtggtgtggtgcaaccgggtcgtagcttacgtttatcttgcgcggcctctggctttacctttagcagctatgcgatgcattgggtgcgtcaggcgccaggtaagggcttagagtgggtggcggttatctcttatgacggtagcaacaagtactacgccgatagcgttaaaggccgcttcacgattagccgcgacaacagcaaaaataccttatacttacagatgaattctttacgcgccgaggatacggccgtttattattgtgccaaagactggggttggtaccgcggttacggtcatgcgggtgccgtggacatttggggccagtggggtcaaggtaccctggtgaccgtttcttctggtggtagctctcgcagcagcagctctggcggcggtggcagcggcggtggcggcgagattgtgctgacccagagcccggcgacgttaagcttatctccgggcgaacgcgcgacgttatcttgccgcgcctctcagtctgtgtctagctcttatctggcctggtaccagcaaaaaccaggtcaggcgccgcgcctgttaatctacggcgcctcttctcgcgcgaccggcatcccggcgcgtttcagcggcagcggttctggcaccgatttcacgctgaccatctctcgcctggagccagaagactttgccgtgtattactgccaacaatctgatagcaatccatactctttcggccaaggcaccaaagttgagatcaaa

SEQ ID NO: 295 - DNA, 762 bp, synthetic construct
  source 1..762: mol_type = other DNA
caggtgcagttagttgaaagcggcggtggtgtggtgcaaccgggtcgtagcttacgtttatcttgcgcggcctctggctttacctttagcagctatgcgatgcattgggtgcgtcaggcgccaggtaagggcttagagtgggtggcggttatctcttatgacggtagcaacaagtactacgccgatagcgttaaaggccgcttcacgattagccgcgacaacagcaaaaataccttatacttacagatgaattctttacgcgccgaggatacggccgtttattattgtgccaaagactggggttggtaccgcggttacggtcatgcgggtgccgtggacatttggggccagtggggtcaaggtaccctggtgaccgtttcttctggtggtagctctcgcagcagcagctctggcggcggtggcagcggcggtggcggcgagattgtgctgacccagagcccggcgacgttaagcttatctccgggcgaacgcgcgacgttatcttgccgcgcctctcagtctgtgtctagctcttatctggcctggtaccagcaaaaaccaggtcaggcgccgcgcctgttaatctacggcgcctcttctcgcgcgaccggcatcccggcgcgtttcagcggcagcggttctggcaccgatttcacgctgaccatctctcgcctggagccagaagactttgccgtgtattactgccaacaatcttatagcccgccaccaacgttcggccaaggcaccaaagttgagatcaaa

SEQ ID NO: 296 - DNA, 762 bp, synthetic construct
  source 1..762: mol_type = other DNA
caggtgcagttagttgaaagcggcggtggtgtggtgcaaccgggtcgtagcttacgtttatcttgcgcggcctctggctttacctttagcagctatgcgatgcattgggtgcgtcaggcgccaggtaagggcttagagtgggtggcggttatctcttatgacggtagcaacaagtactacgccgatagcgttaaaggccgcttcacgattagccgcgacaacagcaaaaataccttatacttacagatgaattctttacgcgccgaggatacggccgtttattattgtgccaaagactggggttggtaccgcggttacggtcatgcgggtgccgtggacatttggggccagtggggtcaaggtaccctggtgaccgtttcttctggtggtagctctcgcagcagcagctctggcggcggtggcagcggcggtggcggcgagattgtgctgacccagagcccggcgacgttaagcttatctccgggcgaacgcgcgacgttatcttgccgcgcctctcagtctgtgtctagctcttatctggcctggtaccagcaaaaaccaggtcaggcgccgcgcctgttaatctacggcgcctcttctcgcgcgaccggcatcccggcgcgtttcagcggcagcggttctggcaccgatttcacgctgaccatctctcgcctggagccagaagactttgccgtgtattactgccaacaatacggcagcagcccacgcacgttcggccaaggcaccaaagttgagatcaaa

SEQ ID NO: 297 - DNA, 759 bp, synthetic construct
  source 1..759: mol_type = other DNA
caggtgcagttagttgaaagcggcggtggtgtggtgcaaccgggtcgtagcttacgtttatcttgcgcggcctctggctttacctttagcagctatgcgatgcattgggtgcgtcaggcgccaggtaagggcttagagtgggtggcggttatctcttatgacggtagcaacaagtactacgccgatagcgttaaaggccgcttcacgattagccgcgacaacagcaaaaataccttatacttacagatgaattctttacgcgccgaggatacggccgtttattattgtgccaaagactggggttggtaccgcggttacggtcatgcgggtgccgtggacatttggggccagtggggtcaaggtaccctggtgaccgtttcttctggtggtagctctcgcagcagcagctctggcggcggtggcagcggcggtggcggcgagattgtgctgacccagagcccggcgacgttaagcttatctccgggcgaacgcgcgacgttatcttgccgcgcctctcagtctgtgtctagctcttatctggcctggtaccagcaaaaaccaggtcaggcgccgcgcctgttaatctacggcgcctcttctcgcgcgaccggcatcccggcgcgtttcagcggcagcggttctggcaccgatttcacgctgaccatctctcgcctggagccagaagactttgccgtgtattactgccaacaatacaaacgtccgttaacgttcggtcagggtaccaaagtggagatcaaa

SEQ ID NO: 298 - DNA, 774 bp, synthetic construct
  source 1..774: mol_type = other DNA
caggtgcagttagttgaaagcggcggtggtgtggtgcaaccgggtcgtagcttacgtttatcttgcgcggcctctggctttacctttagcagctatgcgatgcattgggtgcgtcaggcgccaggtaagggcttagagtgggtggcggttatctcttatgacggtagcaacaagtactacgccgatagcgttaaaggccgcttcacgattagccgcgacaacagcaaaaataccttatacttacagatgaattctttacgcgccgaggatacggccgtttattattgtgccaaagactggggttggtaccgcggttacggtcatgcgggtgccgtggacatttggggccagtggggtcaaggtaccctggtgaccgtttcttctggtggtagctctcgcagcagcagctctggcggcggtggcagcggcggtggcggcgagattgtgctgacccagagcccggcgacgttaagcttatctccgggcgaacgcgcgacgttatcttgccgcgcctctcagtctgtgtctagctcttatctggcctggtaccagcaaaaaccaggtcaggcgccgcgcctgttaatctacggcgcctcttctcgcgcgaccggcatcccggcgcgtttcagcggcagcggttctggcaccgatttcacgctgaccatctctcgcctggagccagaagactttgccgtgtattactgccaagtttgggacagcagcagctcttctttaccagtggtttttggccagggtacgaaggtggagatcaaa

SEQ ID NO: 299 - DNA, 750 bp, synthetic construct
  source 1..750: mol_type = other DNA
caggtgcagttagttgaaagcggcggtggtgtggtgcaaccgggtcgtagcttacgtttatcttgcgcggcctctggctttacctttagcagctatgcgatgcattgggtgcgtcaggcgccaggtaagggcttagagtgggtggcggttatctcttatgacggtagcaacaagtactacgccgatagcgttaaaggccgcttcacgattagccgcgacaacagcaaaaataccttatacttacagatgaattctttacgcgccgaggatacggccgtttattattgtgccaaagagatgtactggcaatcttacttagactattggggccaatggggtcagggtaccctggtgacggtttctagcggcggcagctctcgctcttcttctagcggtggtggcggcagcggtggcggcggtgaaattgtgttaacccagtctccggcgaccctgagcctgagcccgggtgagcgtgccacgctgagctgccgcgcgtctcaatctgtgtcttcttcttatttagcgtggtaccagcaaaaaccgggtcaagcgccacgtttattaatttatggcgccagctctcgcgccaccggtatcccagcccgttttagcggtagcggcagcggtaccgattttacgttaaccattagccgcttagaaccggaggacttcgcggtttactattgtaatgcctgggatagcacgctgcgccaagttgtgtttggccaaggtacgaaggtggagattaaa

SEQ ID NO: 300 - DNA, 759 bp, synthetic construct
  source 1..759: mol_type = other DNA
caggtgcagttagttgaaagcggcggtggtgtggtgcaaccgggtcgtagcttacgtttatcttgcgcggcctctggctttacctttagcagctatgcgatgcattgggtgcgtcaggcgccaggtaagggcttagagtgggtggcggttatctcttatgacggtagcaacaagtactacgccgatagcgttaaaggccgcttcacgattagccgcgacaacagcaaaaataccttatacttacagatgaattctttacgcgccgaggatacggccgtttattattgtgccaaagagcgccgctacgccggtcacagcgtggactactggggccaatggggccagggcacgttagttaccgtgagcagcggtggttcttctcgcagctcttctagcggcggcggtggcagcggtggcggcggcgagattgtgttaacccagagcccggcgaccctgagcttatctccgggtgagcgtgcgaccttaagctgtcgcgccagccaatctgttagctctagctacctggcctggtatcagcaaaagccgggtcaggccccacgtctgctgatctatggtgcctctagccgcgccacgggtattccggcgcgctttagcggctctggcagcggcacggactttaccctgacgatcagccgtttagagccagaagacttcgcggtttattactgcggcacgtgggattcttctttaagcggcctgtcttacgttttcggccaaggcaccaaagttgagatcaaa

SEQ ID NO: 301 - DNA, 759 bp, synthetic construct
  source 1..759: mol_type = other DNA
caggtgcagttagttgaaagcggcggtggtgtggtgcaaccgggtcgtagcttacgtttatcttgcgcggcctctggctttacctttagcagctatgcgatgcattgggtgcgtcaggcgccaggtaagggcttagagtgggtggcggttatctcttatgacggtagcaacaagtactacgccgatagcgttaaaggccgcttcacgattagccgcgacaacagcaaaaataccttatacttacagatgaattctttacgcgccgaggatacggccgtttattattgtgccaaagagtctgtttctggttctcgcctgggctggttcgacccgtggggtcagtggggccagggtacgttagtgaccgtgagctctggtggttcttctcgttcttctagcagcggcggtggcggctctggcggcggcggtgaaattgttctgacccagagcccggcgaccctgtctttaagcccaggtgaacgtgcgacgctgtcttgtcgcgcgtctcaatctgtgtctagctcttatttagcgtggtatcaacaaaaaccaggccaagccccgcgtctgttaatttacggtgccagctctcgcgccacgggcattccggcccgttttagcggtagcggcagcggtacggattttaccttaacgattagccgcttagagccggaggactttgccgtgtactattgccaagtgtgggactcttctagcgatggctacgttttcggtcagggtaccaaagtggagatcaaa

SEQ ID NO: 302 - DNA, 750 bp, synthetic construct
  source 1..750: mol_type = other DNA
caggtgcagttagttgaaagcggcggtggtgtggtgcaaccgggtcgtagcttacgtttatcttgcgcggcctctggctttacctttagcagctatgcgatgcattgggtgcgtcaggcgccaggtaagggcttagagtgggtggcggttatctcttatgacggtagcaacaagtactacgccgatagcgttaaaggccgcttcacgattagccgcgacaacagcaaaaataccttatacttacagatgaattctttacgcgccgaggatacggccgtttattattgtgccaaagagacgacgggtatcggtgcctttgattactggggtcagtggggtcagggcaccttagttacggtgagcagcggcggttcttctcgctctagctcttctggcggcggcggtagcggcggtggcggcgaaatcgtgctgacgcagagcccggcgaccctgagcctgtctccaggcgagcgcgcgaccctgtcttgccgcgcctctcagtctgtttctagctcttatttagcgtggtaccagcagaagccaggccaagcgccacgcctgctgatttacggcgcctcttctcgtgccacgggtatcccggcgcgtttcagcggcagcggtagcggcaccgacttcaccctgaccatctctcgtctggagccagaggatttcgccgtgtactattgtcaggcgtgggacagctctacggccagcgtggtgttcggtcaaggtaccaaggtggaaattaaa

SEQ ID NO: 303 - DNA, 747 bp, synthetic construct
  source 1..747: mol_type = other DNA
caggtgcagttagttgaaagcggcggtggtgtggtgcaaccgggtcgtagcttacgtttatcttgcgcggcctctggctttacctttagcagctatgcgatgcattgggtgcgtcaggcgccaggtaagggcttagagtgggtggcggttatctcttatgacggtagcaacaagtactacgccgatagcgttaaaggccgcttcacgattagccgcgacaacagcaaaaataccttatacttacagatgaattctttacgcgccgaggatacggccgtttattattgtgccaaagagacgacgggtatcggtgcctttgattactggggtcagtggggtcagggcaccttagttacggtgagcagcggcggttcttctcgctctagctcttctggcggcggcggtagcggcggtggcggcgaaatcgtgctgacgcagagcccggcgaccctgagcctgtctccaggcgagcgcgcgaccctgtcttgccgcgcctctcagtctgtttctagctcttatttagcgtggtaccagcagaagccaggccaagcgccacgcctgctgatttacggcgcctcttctcgtgccacgggtatcccggcgcgtttcagcggcagcggtagcggcaccgacttcaccctgaccatctctcgtctggagccagaggatttcgccgtgtactattgtcagctgtggggtaccggtggtgacctggtgtttggtcaaggtacgaaagttgaaattaaa

SEQ ID NO: 304 - DNA, 753 bp, synthetic construct
  source 1..753: mol_type = other DNA
caggtgcagttagttgaaagcggcggtggtgtggtgcaaccgggtcgtagcttacgtttatcttgcgcggcctctggctttacctttagcagctatgcgatgcattgggtgcgtcaggcgccaggtaagggcttagagtgggtggcggttatctcttatgacggtagcaacaagtactacgccgatagcgttaaaggccgcttcacgattagccgcgacaacagcaaaaataccttatacttacagatgaattctttacgcgccgaggatacggccgtttattattgtgccaaagagacgacgggtatcggtgcctttgattactggggtcagtggggtcagggcaccttagttacggtgagcagcggcggttcttctcgctctagctcttctggcggcggcggtagcggcggtggcggcgaaatcgtgctgacgcagagcccggcgaccctgagcctgtctccaggcgagcgcgcgaccctgtcttgccgcgcctctcagtctgtttctagctcttatttagcgtggtaccagcagaagccaggccaagcgccacgcctgctgatttacggcgcctcttctcgtgccacgggtatcccggcgcgtttcagcggcagcggtagcggcaccgacttcaccctgaccatctctcgtctggagccagaggatttcgccgtgtactattgtagcagctacagctcttcttctagcattgcgtggatcttcggtcaaggcacgaaagtggaaatcaaa

SEQ ID NO: 305 - DNA, 750 bp, synthetic construct
  source 1..750: mol_type = other DNA
caggtgcagttagttgaaagcggcggtggtgtggtgcaaccgggtcgtagcttacgtttatcttgcgcggcctctggctttacctttagcagctatgcgatgcattgggtgcgtcaggcgccaggtaagggcttagagtgggtggcggttatctcttatgacggtagcaacaagtactacgccgatagcgttaaaggccgcttcacgattagccgcgacaacagcaaaaataccttatacttacagatgaattctttacgcgccgaggatacggccgtttattattgtgccaaattcaacccagttggtggtttcgatgtgtggggtcaatggggccaaggcaccctggttacggttagcagcggcggctcttctcgctcttctagctctggtggcggcggctctggcggcggtggcgaaattgttctgacccaaagcccggcgaccctgagcctgagcccaggtgaacgcgccaccctgagctgtcgtgcctctcaaagcgtttcttctagctacctggcctggtatcaacagaaaccaggtcaggccccgcgcttactgatttatggtgcgtcttctcgcgcgacgggtatcccagcgcgtttttctggcagcggctctggcaccgatttcacgctgaccatttctcgcctggaaccagaggactttgccgtttattactgcggtacctgggattctagcttattatctgcgtgggtgtttggtcaaggtacgaaagttgaaattaaa

SEQ ID NO: 306 - DNA, 747 bp, synthetic construct
  source 1..747: mol_type = other DNA
caggtgcagttagttgaaagcggcggtggtgtggtgcaaccgggtcgtagcttacgtttatcttgcgcggcctctggctttacctttagcagctatgcgatgcattgggtgcgtcaggcgccaggtaagggcttagagtgggtggcggttatctcttatgacggtagcaacaagtactacgccgatagcgttaaaggccgcttcacgattagccgcgacaacagcaaaaataccttatacttacagatgaattctttacgcgccgaggatacggccgtttattattgtgccaaaggtggttgggcctacatcttcgactattggggccaatggggtcagggtaccctggtgacggtttctagcggcggcagctctcgctcttcttctagcggtggtggcggcagcggtggcggcggtgaaattgtgttaacccagtctccggcgaccctgagcctgagcccgggtgagcgtgccacgctgagctgccgcgcgtctcaatctgtgtcttcttcttatttagcgtggtaccagcaaaaaccgggtcaagcgccacgtttattaatttatggcgccagctctcgcgccaccggtatcccagcccgttttagcggtagcggcagcggtaccgattttacgttaaccattagccgcttagaaccggaggacttcgcggtttactattgtggcacgtgggatagctctagctcttctgccgtgtttggccaaggtacgaaggtggagattaaa

SEQ ID NO: 307 - DNA, 756 bp, synthetic construct
  source 1..756: mol_type = other DNA
caggtgcagttagttgaaagcggcggtggtgtggtgcaaccgggtcgtagcttacgtttatcttgcgcggcctctggctttacctttagcagctatgcgatgcattgggtgcgtcaggcgccaggtaagggcttagagtgggtggcggttatctcttatgacggtagcaacaagtactacgccgatagcgttaaaggccgcttcacgattagccgcgacaacagcaaaaataccttatacttacagatgaattctttacgcgccgaggatacggccgtttattattgtgccaaaggtggttacggtcactctggttatgcgttcgactattggggtcagtggggccagggtacgttagtgaccgtgagctctggtggttcttctcgttcttctagcagcggcggtggcggctctggcggcggcggtgaaattgttctgacccagagcccggcgaccctgtctttaagcccaggtgaacgtgcgacgctgtcttgtcgcgcgtctcaatctgtgtctagctcttatttagcgtggtatcaacaaaaaccaggccaagccccgcgtctgttaatttacggtgccagctctcgcgccacgggcattccggcccgttttagcggtagcggcagcggtacggattttaccttaacgattagccgcttagagccggaggactttgccgtgtactattgcggtaccttagactctagcctgagcttatgggttttcggtcagggtaccaaagtggagatcaaa

SEQ ID NO: 308 - DNA, 750 bp, synthetic construct
  source 1..750: mol_type = other DNA
caggtgcagttagttgaaagcggcggtggtgtggtgcaaccgggtcgtagcttacgtttatcttgcgcggcctctggctttacctttagcagctatgcgatgcattgggtgcgtcaggcgccaggtaagggcttagagtgggtggcggttatctcttatgacggtagcaacaagtactacgccgatagcgttaaaggccgcttcacgattagccgcgacaacagcaaaaataccttatacttacagatgaattctttacgcgccgaggatacggccgtttattattgtgccaaaggtcactcttctacgtacgttattgattactggggtcagtggggtcagggcaccttagttacggtgagcagcggcggttcttctcgctctagctcttctggcggcggcggtagcggcggtggcggcgaaatcgtgctgacgcagagcccggcgaccctgagcctgtctccaggcgagcgcgcgaccctgtcttgccgcgcctctcagtctgtttctagctcttatttagcgtggtaccagcagaagccaggccaagcgccacgcctgctgatttacggcgcctcttctcgtgccacgggtatcccggcgcgtttcagcggcagcggtagcggcaccgacttcaccctgaccatctctcgtctggagccagaggatttcgccgtgtactattgtcaggcgtgggacagctctacgacgggctatgtgttcggtcaaggtaccaaggtggaaattaaa

SEQ ID NO: 309 - DNA, 750 bp, synthetic construct
  source 1..750: mol_type = other DNA
caggtgcagttagttgaaagcggcggtggtgtggtgcaaccgggtcgtagcttacgtttatcttgcgcggcctctggctttacctttagcagctatgcgatgcattgggtgcgtcaggcgccaggtaagggcttagagtgggtggcggttatctcttatgacggtagcaacaagtactacgccgatagcgttaaaggccgcttcacgattagccgcgacaacagcaaaaataccttatacttacagatgaattctttacgcgccgaggatacggccgtttattattgtgccaaaggtatcccattacaatacacgtatggcaacgaccgttggggtcagtggggccagggtacgttagtgaccgtgagctctggtggttcttctcgttcttctagcagcggcggtggcggctctggcggcggcggtgaaattgttctgacccagagcccggcgaccctgtctttaagcccaggtgaacgtgcgacgctgtcttgtcgcgcgtctcaatctgtgtctagctcttatttagcgtggtatcaacaaaaaccaggccaagccccgcgtctgttaatttacggtgccagctctcgcgccacgggcattccggcccgttttagcggtagcggcagcggtacggattttaccttaacgattagccgcttagagccggaggactttgccgtgtactattgccaacagtaccaccactggccgctgaccttcggtcaaggtaccaaggtggaaattaaa

SEQ ID NO: 310 - DNA, 759 bp, synthetic construct
  source 1..759: mol_type = other DNA
caggtgcagttagttgaaagcggcggtggtgtggtgcaaccgggtcgtagcttacgtttatcttgcgcggcctctggctttacctttagcagctatgcgatgcattgggtgcgtcaggcgccaggtaagggcttagagtgggtggcggttatctcttatgacggtagcaacaagtactacgccgatagcgttaaaggccgcttcacgattagccgcgacaacagcaaaaataccttatacttacagatgaattctttacgcgccgaggatacggccgtttattattgtgccaaaggtttatcttgggccggttcttacggctatgttatcgattactggggccagtggggccaaggtacgctggtgaccgtgtcttctggtggttctagccgctctagcagcagcggtggcggcggtagcggcggcggtggcgaaatcgtgctgacccagagcccggcgaccttatctctgtctccaggcgaacgtgccaccttatcttgtcgtgcctctcaaagcgttagctctagctacctggcgtggtaccaacagaagccgggtcaagcgccgcgtttactgatctacggtgcgtcttctcgcgccaccggcattccagcgcgtttttctggcagcggctctggtaccgattttacgttaaccatttctcgcttagaaccagaggatttcgcggtttattattgtcagcaatactacagcaccccgccagccacgttcggccaaggcaccaaagttgagatcaaa

SEQ ID NO: 311 - DNA, 741 bp, synthetic construct
  source 1..741: mol_type = other DNA
caggtgcagttagttgaaagcggcggtggtgtggtgcaaccgggtcgtagcttacgtttatcttgcgcggcctctggctttacctttagcagctatgcgatgcattgggtgcgtcaggcgccaggtaagggcttagagtgggtggcggttatctcttatgacggtagcaacaagtactacgccgatagcgttaaaggccgcttcacgattagccgcgacaacagcaaaaataccttatacttacagatgaattctttacgcgccgaggatacggccgtttattattgtgccaaaggtttatggggtgccttcgactactggggccagtggggtcaaggcacgctggtgaccgtttcttctggcggcagcagccgctcttcttcttctggcggtggtggcagcggcggtggcggcgagattgtgctgacgcagagcccagcgaccctgagcctgagcccgggcgagcgcgcgacgttaagctgccgtgccagccaatctgttagctcttcttacctggcctggtatcaacagaagccgggccaagccccgcgcctgttaatctatggcgcgtctagccgcgccacgggcatcccagcccgctttagcggctctggcagcggcacggattttaccttaacgattagccgtttagagccggaagacttcgccgtgtactactgccaagcgtgggacagccgtacgccgtacgttttcggccagggcacgaaggttgagattaaa

SEQ ID NO: 312 - DNA, 747 bp, synthetic construct
  source 1..747: mol_type = other DNA
caggtgcagttagttgaaagcggcggtggtgtggtgcaaccgggtcgtagcttacgtttatcttgcgcggcctctggctttacctttagcagctatgcgatgcattgggtgcgtcaggcgccaggtaagggcttagagtgggtggcggttatctcttatgacggtagcaacaagtactacgccgatagcgttaaaggccgcttcacgattagccgcgacaacagcaaaaataccttatacttacagatgaattctttacgcgccgaggatacggccgtttattattgtgccaaaggtcgcggttggaagggtttagacatttggggccaatggggtcagggtaccctggtgacggtttctagcggcggcagctctcgctcttcttctagcggtggtggcggcagcggtggcggcggtgaaattgtgttaacccagtctccggcgaccctgagcctgagcccgggtgagcgtgccacgctgagctgccgcgcgtctcaatctgtgtcttcttcttatttagcgtggtaccagcaaaaaccgggtcaagcgccacgtttattaatttatggcgccagctctcgcgccaccggtatcccagcccgttttagcggtagcggcagcggtaccgattttacgttaaccattagccgcttagaaccggaggacttcgcggtttactattgtggctcttatggctctacctctggtttatatgtgtttggtcaaggtacgaaagttgaaattaaa

SEQ ID NO: 313 - DNA, 744 bp, synthetic construct
  source 1..744: mol_type = other DNA
caggtgcagttagttgaaagcggcggtggtgtggtgcaaccgggtcgtagcttacgtttatcttgcgcggcctctggctttacctttagcagctatgcgatgcattgggtgcgtcaggcgccaggtaagggcttagagtgggtggcggttatctcttatgacggtagcaacaagtactacgccgatagcgttaaaggccgcttcacgattagccgcgacaacagcaaaaataccttatacttacagatgaattctttacgcgccgaggatacggccgtttattattgtgccaaaggtcgcggttggaagggtttagacatttggggccaatggggtcagggtaccctggtgacggtttctagcggcggcagctctcgctcttcttctagcggtggtggcggcagcggtggcggcggtgaaattgtgttaacccagtctccggcgaccctgagcctgagcccgggtgagcgtgccacgctgagctgccgcgcgtctcaatctgtgtcttcttcttatttagcgtggtaccagcaaaaaccgggtcaagcgccacgtttattaatttatggcgccagctctcgcgccaccggtatcccagcccgttttagcggtagcggcagcggtaccgattttacgttaaccattagccgcttagaaccggaggacttcgcggtttactattgtcaggcctgggatagctctagcttagttgtttttggccagggtacgaaggttgaaatcaaa

SEQ ID NO: 314 - DNA, 750 bp, synthetic construct
  source 1..750: mol_type = other DNA
caggtgcagttagttgaaagcggcggtggtgtggtgcaaccgggtcgtagcttacgtttatcttgcgcggcctctggctttacctttagcagctatgcgatgcattgggtgcgtcaggcgccaggtaagggcttagagtgggtggcggttatctcttatgacggtagcaacaagtactacgccgatagcgttaaaggccgcttcacgattagccgcgacaacagcaaaaataccttatacttacagatgaattctttacgcgccgaggatacggccgtttattattgtgccaaaggtcgcggttggaagggtttagacatttggggccaatggggtcagggtaccctggtgacggtttctagcggcggcagctctcgctcttcttctagcggtggtggcggcagcggtggcggcggtgaaattgtgttaacccagtctccggcgaccctgagcctgagcccgggtgagcgtgccacgctgagctgccgcgcgtctcaatctgtgtcttcttcttatttagcgtggtaccagcaaaaaccgggtcaagcgccacgtttattaatttatggcgccagctctcgcgccaccggtatcccagcccgttttagcggtagcggcagcggtaccgattttacgttaaccattagccgcttagaaccggaggacttcgcggtttactattgtcagtcttatgattctagcttatcttctctggtggtgttcggtcaaggtaccaaggtggaaattaaa

SEQ ID NO: 315 - DNA, 753 bp, synthetic construct
  source 1..753: mol_type = other DNA
caggtgcagttagttgaaagcggcggtggtgtggtgcaaccgggtcgtagcttacgtttatcttgcgcggcctctggctttacctttagcagctatgcgatgcattgggtgcgtcaggcgccaggtaagggcttagagtgggtggcggttatctcttatgacggtagcaacaagtactacgccgatagcgttaaaggccgcttcacgattagccgcgacaacagcaaaaataccttatacttacagatgaattctttacgcgccgaggatacggccgtttattattgtgccaaaggtcgcggttggaagggtttagacatttggggccaatggggtcagggtaccctggtgacggtttctagcggcggcagctctcgctcttcttctagcggtggtggcggcagcggtggcggcggtgaaattgtgttaacccagtctccggcgaccctgagcctgagcccgggtgagcgtgccacgctgagctgccgcgcgtctcaatctgtgtcttcttcttatttagcgtggtaccagcaaaaaccgggtcaagcgccacgtttattaatttatggcgccagctctcgcgccaccggtatcccagcccgttttagcggtagcggcagcggtaccgattttacgttaaccattagccgcttagaaccggaggacttcgcggtttactattgtcagtcttatgattctagcttatcttctagcctggtggttttcggtcaaggcacgaaagtggaaatcaaa

SEQ ID NO: 316 - DNA, 750 bp, synthetic construct
  source 1..750: mol_type = other DNA
caggtgcagttagttgaaagcggcggtggtgtggtgcaaccgggtcgtagcttacgtttatcttgcgcggcctctggctttacctttagcagctatgcgatgcattgggtgcgtcaggcgccaggtaagggcttagagtgggtggcggttatctcttatgacggtagcaacaagtactacgccgatagcgttaaaggccgcttcacgattagccgcgacaacagcaaaaataccttatacttacagatgaattctttacgcgccgaggatacggccgtttattattgtgccaaaggtcgcggttggaagggtttagacatttggggccaatggggtcagggtaccctggtgacggtttctagcggcggcagctctcgctcttcttctagcggtggtggcggcagcggtggcggcggtgaaattgtgttaacccagtctccggcgaccctgagcctgagcccgggtgagcgtgccacgctgagctgccgcgcgtctcaatctgtgtcttcttcttatttagcgtggtaccagcaaaaaccgggtcaagcgccacgtttattaatttatggcgccagctctcgcgccaccggtatcccagcccgttttagcggtagcggcagcggtaccgattttacgttaaccattagccgcttagaaccggaggacttcgcggtttactattgtcagtcttatgattctagctctggtccactggtggtgttcggtcaaggtaccaaggtggaaattaaa

SEQ ID NO: 317 - DNA, 750 bp, synthetic construct
  source 1..750: mol_type = other DNA
caggtgcagttagttgaaagcggcggtggtgtggtgcaaccgggtcgtagcttacgtttatcttgcgcggcctctggctttacctttagcagctatgcgatgcattgggtgcgtcaggcgccaggtaagggcttagagtgggtggcggttatctcttatgacggtagcaacaagtactacgccgatagcgttaaaggccgcttcacgattagccgcgacaacagcaaaaataccttatacttacagatgaattctttacgcgccgaggatacggccgtttattattgtgccaaaggtcgcggttggaagggtttagacatttggggccaatggggtcagggtaccctggtgacggtttctagcggcggcagctctcgctcttcttctagcggtggtggcggcagcggtggcggcggtgaaattgtgttaacccagtctccggcgaccctgagcctgagcccgggtgagcgtgccacgctgagctgccgcgcgtctcaatctgtgtcttcttcttatttagcgtggtaccagcaaaaaccgggtcaagcgccacgtttattaatttatggcgccagctctcgcgccaccggtatcccagcccgttttagcggtagcggcagcggtaccgattttacgttaaccattagccgcttagaaccggaggacttcgcggtttactattgtcaggtttgggatagcacgaccgacttaaactatgtgtttggtcaaggtacgaaagttgaaattaaa

SEQ ID NO: 318 - DNA, 765 bp, synthetic construct
  source 1..765: mol_type = other DNA
caggtgcagttagttgaaagcggcggtggtgtggtgcaaccgggtcgtagcttacgtttatcttgcgcggcctctggctttacctttagcagctatgcgatgcattgggtgcgtcaggcgccaggtaagggcttagagtgggtggcggttatctcttatgacggtagcaacaagtactacgccgatagcgttaaaggccgcttcacgattagccgcgacaacagcaaaaataccttatacttacagatgaattctttacgcgccgaggatacggccgtttattattgtgccaaaggtacgcaataccgcgcctggtggtctgtgcgtggttacatggatgtttggggccagtggggccaaggtacgctggtgaccgtgtcttctggtggttctagccgctctagcagcagcggtggcggcggtagcggcggcggtggcgaaatcgtgctgacccagagcccggcgaccttatctctgtctccaggcgaacgtgccaccttatcttgtcgtgcctctcaaagcgttagctctagctacctggcgtggtaccaacagaagccgggtcaagcgccgcgtttactgatctacggtgcgtcttctcgcgccaccggcattccagcgcgtttttctggcagcggctctggtaccgattttacgttaaccatttctcgcttagaaccagaggatttcgcggtttattattgtctgtcttacacgagcacccataactgggttttcggtcagggtaccaaagtggagatcaaa

SEQ ID NO: 319 - DNA, 747 bp, synthetic construct
  source 1..747: mol_type = other DNA
caggtgcagttagttgaaagcggcggtggtgtggtgcaaccgggtcgtagcttacgtttatcttgcgcggcctctggctttacctttagcagctatgcgatgcattgggtgcgtcaggcgccaggtaagggcttagagtgggtggcggttatctcttatgacggtagcaacaagtactacgccgatagcgttaaaggccgcttcacgattagccgcgacaacagcaaaaataccttatacttacagatgaattctttacgcgccgaggatacggccgtttattattgtgccaaaggtacgacgcgcttaggtgacaattggggccaatggggtcagggtaccctggtgacggtttctagcggcggcagctctcgctcttcttctagcggtggtggcggcagcggtggcggcggtgaaattgtgttaacccagtctccggcgaccctgagcctgagcccgggtgagcgtgccacgctgagctgccgcgcgtctcaatctgtgtcttcttcttatttagcgtggtaccagcaaaaaccgggtcaagcgccacgtttattaatttatggcgccagctctcgcgccaccggtatcccagcccgttttagcggtagcggcagcggtaccgattttacgttaaccattagccgcttagaaccggaggacttcgcggtttactattgtggcacgtgggatagctctctgggtgcccgctatgtgtttggtcaaggtacgaaagttgaaattaaa

SEQ ID NO: 320 - DNA, 747 bp, synthetic construct
  source 1..747: mol_type = other DNA
caggtgcagttagttgaaagcggcggtggtgtggtgcaaccgggtcgtagcttacgtttatcttgcgcggcctctggctttacctttagcagctatgcgatgcattgggtgcgtcaggcgccaggtaagggcttagagtgggtggcggttatctcttatgacggtagcaacaagtactacgccgatagcgttaaaggccgcttcacgattagccgcgacaacagcaaaaataccttatacttacagatgaattctttacgcgccgaggatacggccgtttattattgtgccaaaggtacgacgcgcttaggtgacaattggggccaatggggtcagggtaccctggtgacggtttctagcggcggcagctctcgctcttcttctagcggtggtggcggcagcggtggcggcggtgaaattgtgttaacccagtctccggcgaccctgagcctgagcccgggtgagcgtgccacgctgagctgccgcgcgtctcaatctgtgtcttcttcttatttagcgtggtaccagcaaaaaccgggtcaagcgccacgtttattaatttatggcgccagctctcgcgccaccggtatcccagcccgttttagcggtagcggcagcggtaccgattttacgttaaccattagccgcttagaaccggaggacttcgcggtttactattgtggcacgtgggatagctctagctctccagactatgtgtttggtcaaggtacgaaagttgaaattaaa

SEQ ID NO: 321 - DNA, 756 bp, synthetic construct
  source 1..756: mol_type = other DNA
caggtgcagttagttgaaagcggcggtggtgtggtgcaaccgggtcgtagcttacgtttatcttgcgcggcctctggctttacctttagcagctatgcgatgcattgggtgcgtcaggcgccaggtaagggcttagagtgggtggcggttatctcttatgacggtagcaacaagtactacgccgatagcgttaaaggccgcttcacgattagccgcgacaacagcaaaaataccttatacttacagatgaattctttacgcgccgaggatacggccgtttattattgtgccaaaggttggggttaccgcggtgacatctatggctacttcgattactggggccagtggggccaaggtacgctggtgaccgtgtcttctggtggttctagccgctctagcagcagcggtggcggcggtagcggcggcggtggcgaaatcgtgctgacccagagcccggcgaccttatctctgtctccaggcgaacgtgccaccttatcttgtcgtgcctctcaaagcgttagctctagctacctggcgtggtaccaacagaagccgggtcaagcgccgcgtttactgatctacggtgcgtcttctcgcgccaccggcattccagcgcgtttttctggcagcggctctggtaccgattttacgttaaccatttctcgcttagaaccagaggatttcgcggtttattattgtagcgcctacacgagcagcagcacggttttcggtcagggtaccaaagtggagatcaaa

SEQ ID NO: 322 - DNA, 747 bp, synthetic construct
  source 1..747: mol_type = other DNA
caggtgcagttagttgaaagcggcggtggtgtggtgcaaccgggtcgtagcttacgtttatcttgcgcggcctctggctttacctttagcagctatgcgatgcattgggtgcgtcaggcgccaggtaagggcttagagtgggtggcggttatctcttatgacggtagcaacaagtactacgccgatagcgttaaaggccgcttcacgattagccgcgacaacagcaaaaataccttatacttacagatgaattctttacgcgccgaggatacggccgtttattattgtgccaaaggttacggtccagccaacgcctttgattactggggtcagtggggtcagggcaccttagttacggtgagcagcggcggttcttctcgctctagctcttctggcggcggcggtagcggcggtggcggcgaaatcgtgctgacgcagagcccggcgaccctgagcctgtctccaggcgagcgcgcgaccctgtcttgccgcgcctctcagtctgtttctagctcttatttagcgtggtaccagcagaagccaggccaagcgccacgcctgctgatttacggcgcctcttctcgtgccacgggtatcccggcgcgtttcagcggcagcggtagcggcaccgacttcaccctgaccatctctcgtctggagccagaggatttcgccgtgtactattgtggcacctgggacagctctgaccactttgtgtttggtcaaggtacgaaagttgaaattaaa

SEQ ID NO: 323 - DNA, 744 bp, synthetic construct
  source 1..744: mol_type = other DNA
caggtgcagttagttgaaagcggcggtggtgtggtgcaaccgggtcgtagcttacgtttatcttgcgcggcctctggctttacctttagcagctatgcgatgcattgggtgcgtcaggcgccaggtaagggcttagagtgggtggcggttatctcttatgacggtagcaacaagtactacgccgatagcgttaaaggccgcttcacgattagccgcgacaacagcaaaaataccttatacttacagatgaattctttacgcgccgaggatacggccgtttattattgtgccaaaggttacggtccagccaacgcctttgattactggggtcagtggggtcagggcaccttagttacggtgagcagcggcggttcttctcgctctagctcttctggcggcggcggtagcggcggtggcggcgaaatcgtgctgacgcagagcccggcgaccctgagcctgtctccaggcgagcgcgcgaccctgtcttgccgcgcctctcagtctgtttctagctcttatttagcgtggtaccagcagaagccaggccaagcgccacgcctgctgatttacggcgcctcttctcgtgccacgggtatcccggcgcgtttcagcggcagcggtagcggcaccgacttcaccctgaccatctctcgtctggagccagaggatttcgccgtgtactattgtatgcagggctctcgttggccattagcctttggccagggtacgaaggttgaaatcaaa

SEQ ID NO: 324 - DNA, 744 bp, synthetic construct
  source 1..744: mol_type = other DNA
caggtgcagttagttgaaagcggcggtggtgtggtgcaaccgggtcgtagcttacgtttatcttgcgcggcctctggctttacctttagcagctatgcgatgcattgggtgcgtcaggcgccaggtaagggcttagagtgggtggcggttatctcttatgacggtagcaacaagtactacgccgatagcgttaaaggccgcttcacgattagccgcgacaacagcaaaaataccttatacttacagatgaattctttacgcgccgaggatacggccgtttattattgtgccaaaggttacggtccagccaacgcctttgattactggggtcagtggggtcagggcaccttagttacggtgagcagcggcggttcttctcgctctagctcttctggcggcggcggtagcggcggtggcggcgaaatcgtgctgacgcagagcccggcgaccctgagcctgtctccaggcgagcgcgcgaccctgtcttgccgcgcctctcagtctgtttctagctcttatttagcgtggtaccagcagaagccaggccaagcgccacgcctgctgatttacggcgcctcttctcgtgccacgggtatcccggcgcgtttcagcggcagcggtagcggcaccgacttcaccctgaccatctctcgtctggagccagaggatttcgccgtgtactattgtcagcagtcttattctacgttatatacctttggtcaaggtacgaaagttgaaattaaa

SEQ ID NO: 325 - DNA, 747 bp, synthetic construct
  source 1..747: mol_type = other DNA
caggtgcagttagttgaaagcggcggtggtgtggtgcaaccgggtcgtagcttacgtttatcttgcgcggcctctggctttacctttagcagctatgcgatgcattgggtgcgtcaggcgccaggtaagggcttagagtgggtggcggttatctcttatgacggtagcaacaagtactacgccgatagcgttaaaggccgcttcacgattagccgcgacaacagcaaaaataccttatacttacagatgaattctttacgcgccgaggatacggccgtttattattgtgccaaaggttacggtccagccaacgcctttgattactggggtcagtggggtcagggcaccttagttacggtgagcagcggcggttcttctcgctctagctcttctggcggcggcggtagcggcggtggcggcgaaatcgtgctgacgcagagcccggcgaccctgagcctgtctccaggcgagcgcgcgaccctgtcttgccgcgcctctcagtctgtttctagctcttatttagcgtggtaccagcagaagccaggccaagcgccacgcctgctgatttacggcgcctcttctcgtgccacgggtatcccggcgcgtttcagcggcagcggtagcggcaccgacttcaccctgaccatctctcgtctggagccagaggatttcgccgtgtactattgtcagcagtacaattctgccgacccgtataccttcggtcaaggtaccaaggtggaaattaaa

SEQ ID NO: 326 - DNA, 744 bp, synthetic construct
  source 1..744: mol_type = other DNA
caggtgcagttagttgaaagcggcggtggtgtggtgcaaccgggtcgtagcttacgtttatcttgcgcggcctctggctttacctttagcagctatgcgatgcattgggtgcgtcaggcgccaggtaagggcttagagtgggtggcggttatctcttatgacggtagcaacaagtactacgccgatagcgttaaaggccgcttcacgattagccgcgacaacagcaaaaataccttatacttacagatgaattctttacgcgccgaggatacggccgtttattattgtgccaaaggttacggtccagccaacgcctttgattactggggtcagtggggtcagggcaccttagttacggtgagcagcggcggttcttctcgctctagctcttctggcggcggcggtagcggcggtggcggcgaaatcgtgctgacgcagagcccggcgaccctgagcctgtctccaggcgagcgcgcgaccctgtcttgccgcgcctctcagtctgtttctagctcttatttagcgtggtaccagcagaagccaggccaagcgccacgcctgctgatttacggcgcctcttctcgtgccacgggtatcccggcgcgtttcagcggcagcggtagcggcaccgacttcaccctgaccatctctcgtctggagccagaggatttcgccgtgtactattgtcagagctgggacagcaacacggttatgtttggccagggtacgaaggttgaaatcaaa

SEQ ID NO: 327 - DNA, 759 bp, synthetic construct
  source 1..759: mol_type = other DNA
caggtgcagttagttgaaagcggcggtggtgtggtgcaaccgggtcgtagcttacgtttatcttgcgcggcctctggctttacctttagcagctatgcgatgcattgggtgcgtcaggcgccaggtaagggcttagagtgggtggcggttatctcttatgacggtagcaacaagtactacgccgatagcgttaaaggccgcttcacgattagccgcgacaacagcaaaaataccttatacttacagatgaattctttacgcgccgaggatacggccgtttattattgtgccaaacacggtgacgttgacacgatggccgtgccgttccacagctggggtcagtggggccagggtacgttagtgaccgtgagctctggtggttcttctcgttcttctagcagcggcggtggcggctctggcggcggcggtgaaattgttctgacccagagcccggcgaccctgtctttaagcccaggtgaacgtgcgacgctgtcttgtcgcgcgtctcaatctgtgtctagctcttatttagcgtggtatcaacaaaaaccaggccaagccccgcgtctgttaatttacggtgccagctctcgcgccacgggcattccggcccgttttagcggtagcggcagcggtacggattttaccttaacgattagccgcttagagccggaggactttgccgtgtactattgcggtacctgggactcttctctgctgagctacgttttcggtcagggtaccaaagtggagatcaaa

SEQ ID NO: 328 - DNA, 756 bp, synthetic construct
  source 1..756: mol_type = other DNA
caggtgcagttagttgaaagcggcggtggtgtggtgcaaccgggtcgtagcttacgtttatcttgcgcggcctctggctttacctttagcagctatgcgatgcattgggtgcgtcaggcgccaggtaagggcttagagtgggtggcggttatctcttatgacggtagcaacaagtactacgccgatagcgttaaaggccgcttcacgattagccgcgacaacagcaaaaataccttatacttacagatgaattctttacgcgccgaggatacggccgtttattattgtgccaaacactctccatctgagtcttggccactggatcactggggtcagtggggtcagggcaccttagttacggtgagcagcggcggttcttctcgctctagctcttctggcggcggcggtagcggcggtggcggcgaaatcgtgctgacgcagagcccggcgaccctgagcctgtctccaggcgagcgcgcgaccctgtcttgccgcgcctctcagtctgtttctagctcttatttagcgtggtaccagcagaagccaggccaagcgccacgcctgctgatttacggcgcctcttctcgtgccacgggtatcccggcgcgtttcagcggcagcggtagcggcaccgacttcaccctgaccatctctcgtctggagccagaggatttcgccgtgtactattgtggcagctgggagagcaacgttaaccgtttttatgttttcggtcaaggcacgaaagtggaaatcaaa

SEQ ID NO: 329 - DNA, 744 bp, synthetic construct
  source 1..744: mol_type = other DNA
caggtgcagttagttgaaagcggcggtggtgtggtgcaaccgggtcgtagcttacgtttatcttgcgcggcctctggctttacctttagcagctatgcgatgcattgggtgcgtcaggcgccaggtaagggcttagagtgggtggcggttatctcttatgacggtagcaacaagtactacgccgatagcgttaaaggccgcttcacgattagccgcgacaacagcaaaaataccttatacttacagatgaattctttacgcgccgaggatacggccgtttattattgtgccaaacacacgatctctgagcgcccatttaaaccatggggtcagtggggtcagggcaccttagttacggtgagcagcggcggttcttctcgctctagctcttctggcggcggcggtagcggcggtggcggcgaaatcgtgctgacgcagagcccggcgaccctgagcctgtctccaggcgagcgcgcgaccctgtcttgccgcgcctctcagtctgtttctagctcttatttagcgtggtaccagcagaagccaggccaagcgccacgcctgctgatttacggcgcctcttctcgtgccacgggtatcccggcgcgtttcagcggcagcggtagcggcaccgacttcaccctgaccatctctcgtctggagccagaggatttcgccgtgtactattgtcagcagggtaatacgccaggtcagacctttggtcaaggtacgaaagttgaaattaaa

SEQ ID NO: 330 - DNA, 738 bp, synthetic construct
  source 1..738: mol_type = other DNA
caggtgcagttagttgaaagcggcggtggtgtggtgcaaccgggtcgtagcttacgtttatcttgcgcggcctctggctttacctttagcagctatgcgatgcattgggtgcgtcaggcgccaggtaagggcttagagtgggtggcggttatctcttatgacggtagcaacaagtactacgccgatagcgttaaaggccgcttcacgattagccgcgacaacagcaaaaataccttatacttacagatgaattctttacgcgccgaggatacggccgtttattattgtgccaaaatctggcgccgctacttcgactactggggccagtggggtcaaggcacgctggtgaccgtttcttctggcggcagcagccgctcttcttcttctggcggtggtggcagcggcggtggcggcgagattgtgctgacgcagagcccagcgaccctgagcctgagcccgggcgagcgcgcgacgttaagctgccgtgccagccaatctgttagctcttcttacctggcctggtatcaacagaagccgggccaagccccgcgcctgttaatctatggcgcgtctagccgcgccacgggcatcccagcccgctttagcggctctggcagcggcacggattttaccttaacgattagccgtttagagccggaagacttcgccgtgtactactgccaacaggcctatagcttcccgccaacgttcggccagggcacgaaggttgagattaaa

SEQ ID NO: 331 - DNA, 774 bp, synthetic construct
  source 1..774: mol_type = other DNA
caggtgcagttagttgaaagcggcggtggtgtggtgcaaccgggtcgtagcttacgtttatcttgcgcggcctctggctttacctttagcagctatgcgatgcattgggtgcgtcaggcgccaggtaagggcttagagtgggtggcggttatctcttatgacggtagcaacaagtactacgccgatagcgttaaaggccgcttcacgattagccgcgacaacagcaaaaataccttatacttacagatgaattctttacgcgccgaggatacggccgtttattattgtgccaaattacgcgtttctcgcgactggtctaccaattaccaatggaatccatattttgatatctggggtcaatggggccagggcaccttagttacggtttctagcggtggtagcagccgttctagcagctctggcggcggcggtagcggcggtggcggcgaaattgtgctgacccagtctccagcgacgttaagcctgagcccaggcgagcgcgccaccttatcttgtcgtgccagccaaagcgttagcagctcttacctggcctggtatcaacaaaaaccgggccaagcgccacgcttactgatctacggtgccagcagccgtgccaccggcattccagcgcgtttttctggtagcggcagcggtacggattttacgttaacgatttctcgcctggagccggaggattttgccgtgtactactgtagcagctatacgtcttcttctacctgggtttttggccagggtacgaaggtggagatcaaa

SEQ ID NO: 332 - DNA, 738 bp, synthetic construct
  source 1..738: mol_type = other DNA
caggtgcagttagttgaaagcggcggtggtgtggtgcaaccgggtcgtagcttacgtttatcttgcgcggcctctggctttacctttagcagctatgcgatgcattgggtgcgtcaggcgccaggtaagggcttagagtgggtggcggttatctcttatgacggtagcaacaagtactacgccgatagcgttaaaggccgcttcacgattagccgcgacaacagcaaaaataccttatacttacagatgaattctttacgcgccgaggatacggccgtttattattgtgccaaaaactacggtggttctttagacaattggggccaatggggtcagggtaccctggtgacggtttctagcggcggcagctctcgctcttcttctagcggtggtggcggcagcggtggcggcggtgaaattgtgttaacccagtctccggcgaccctgagcctgagcccgggtgagcgtgccacgctgagctgccgcgcgtctcaatctgtgtcttcttcttatttagcgtggtaccagcaaaaaccgggtcaagcgccacgtttattaatttatggcgccagctctcgcgccaccggtatcccagcccgttttagcggtagcggcagcggtaccgattttacgttaaccattagccgcttagaaccggaggacttcgcggtttactattgtatgcaggccacctggccgccacagacgttcggtcagggcaccaaggttgagatcaaa

SEQ ID NO: 333 - DNA, 738 bp, synthetic construct
  source 1..738: mol_type = other DNA
caggtgcagttagttgaaagcggcggtggtgtggtgcaaccgggtcgtagcttacgtttatcttgcgcggcctctggctttacctttagcagctatgcgatgcattgggtgcgtcaggcgccaggtaagggcttagagtgggtggcggttatctcttatgacggtagcaacaagtactacgccgatagcgttaaaggccgcttcacgattagccgcgacaacagcaaaaataccttatacttacagatgaattctttacgcgccgaggatacggccgtttattattgtgccaaaaactacggtggttctttagacaattggggccaatggggtcagggtaccctggtgacggtttctagcggcggcagctctcgctcttcttctagcggtggtggcggcagcggtggcggcggtgaaattgtgttaacccagtctccggcgaccctgagcctgagcccgggtgagcgtgccacgctgagctgccgcgcgtctcaatctgtgtcttcttcttatttagcgtggtaccagcaaaaaccgggtcaagcgccacgtttattaatttatggcgccagctctcgcgccaccggtatcccagcccgttttagcggtagcggcagcggtaccgattttacgttaaccattagccgcttagaaccggaggacttcgcggtttactattgtcagcaatatgataacccgccaccaacgtttggccagggtacgaaggttgaaatcaaa

SEQ ID NO: 334 - DNA, 747 bp, synthetic construct
  source 1..747: mol_type = other DNA
caggtgcagttagttgaaagcggcggtggtgtggtgcaaccgggtcgtagcttacgtttatcttgcgcggcctctggctttacctttagcagctatgcgatgcattgggtgcgtcaggcgccaggtaagggcttagagtgggtggcggttatctcttatgacggtagcaacaagtactacgccgatagcgttaaaggccgcttcacgattagccgcgacaacagcaaaaataccttatacttacagatgaattctttacgcgccgaggatacggccgtttattattgtgccaaacgccacgacgccttatgggccttcgattattggggtcaatggggccaaggcaccctggttacggttagcagcggcggctcttctcgctcttctagctctggtggcggcggctctggcggcggtggcgaaattgttctgacccaaagcccggcgaccctgagcctgagcccaggtgaacgcgccaccctgagctgtcgtgcctctcaaagcgtttcttctagctacctggcctggtatcaacagaaaccaggtcaggccccgcgcttactgatttatggtgcgtcttctcgcgcgacgggtatcccagcgcgtttttctggcagcggctctggcaccgatttcacgctgaccatttctcgcctggaaccagaggactttgccgtttattactgcggtgcgtgggattctaatcacttacgcatttttggccaaggtacgaaggtggagattaaa

SEQ ID NO: 335 - DNA, 747 bp, synthetic construct
  source 1..747: mol_type = other DNA
caggtgcagttagttgaaagcggcggtggtgtggtgcaaccgggtcgtagcttacgtttatcttgcgcggcctctggctttacctttagcagctatgcgatgcattgggtgcgtcaggcgccaggtaagggcttagagtgggtggcggttatctcttatgacggtagcaacaagtactacgccgatagcgttaaaggccgcttcacgattagccgcgacaacagcaaaaataccttatacttacagatgaattctttacgcgccgaggatacggccgtttattattgtgccaaacgccacgacgccttatgggccttcgattattggggtcaatggggccaaggcaccctggttacggttagcagcggcggctcttctcgctcttctagctctggtggcggcggctctggcggcggtggcgaaattgttctgacccaaagcccggcgaccctgagcctgagcccaggtgaacgcgccaccctgagctgtcgtgcctctcaaagcgtttcttctagctacctggcctggtatcaacagaaaccaggtcaggccccgcgcttactgatttatggtgcgtcttctcgcgcgacgggtatcccagcgcgtttttctggcagcggctctggcaccgatttcacgctgaccatttctcgcctggaaccagaggactttgccgtttattactgccaacagcgttctaattggccaccatacacctttggccaaggtacgaaggtggagattaaa

SEQ ID NO: 336 - DNA, 750 bp, synthetic construct
  source 1..750: mol_type = other DNA
caggtgcagttagttgaaagcggcggtggtgtggtgcaaccgggtcgtagcttacgtttatcttgcgcggcctctggctttacctttagcagctatgcgatgcattgggtgcgtcaggcgccaggtaagggcttagagtgggtggcggttatctcttatgacggtagcaacaagtactacgccgatagcgttaaaggccgcttcacgattagccgcgacaacagcaaaaataccttatacttacagatgaattctttacgcgccgaggatacggccgtttattattgtgccaaacgccacgacgccttatgggccttcgattattggggtcaatggggccaaggcaccctggttacggttagcagcggcggctcttctcgctcttctagctctggtggcggcggctctggcggcggtggcgaaattgttctgacccaaagcccggcgaccctgagcctgagcccaggtgaacgcgccaccctgagctgtcgtgcctctcaaagcgtttcttctagctacctggcctggtatcaacagaaaccaggtcaggccccgcgcttactgatttatggtgcgtcttctcgcgcgacgggtatcccagcgcgtttttctggcagcggctctggcaccgatttcacgctgaccatttctcgcctggaaccagaggactttgccgtttattactgccaagtgtgggattctagctcttctcaccatgtgtttggtcaaggtacgaaagttgaaattaaa

SEQ ID NO: 337 - DNA, 762 bp, synthetic construct
  source 1..762: mol_type = other DNA
caggtgcagttagttgaaagcggcggtggtgtggtgcaaccgggtcgtagcttacgtttatcttgcgcggcctctggctttacctttagcagctatgcgatgcattgggtgcgtcaggcgccaggtaagggcttagagtgggtggcggttatctcttatgacggtagcaacaagtactacgccgatagcgttaaaggccgcttcacgattagccgcgacaacagcaaaaataccttatacttacagatgaattctttacgcgccgaggatacggccgtttattattgtgccaaatctggtaagtaccgccgcttcggcatttacccagattacatggatgtgtggggccaatggggtcaaggcaccctggtgacggtttcttctggtggctcttctcgtagcagctctagcggcggtggcggcagcggtggcggcggtgaaattgtgctgacccagagcccggccacgctgtctttaagcccgggcgagcgtgccacgttaagctgtcgcgccagccaaagcgttagctctagctatttagcctggtatcaacagaagccaggccaggcgccacgtttattaatctatggtgcctcttctcgtgcgaccggtattccggcgcgctttagcggctctggtagcggcaccgacttcaccctgacgatctctcgtttagagccggaggatttcgcggtgtactattgtcaacaaagcaatattttaccaatcacgtttggtcagggcaccaaggttgagattaaa

SEQ ID NO: 338 - DNA, 762 bp, synthetic construct
  source 1..762: mol_type = other DNA
caggtgcagttagttgaaagcggcggtggtgtggtgcaaccgggtcgtagcttacgtttatcttgcgcggcctctggctttacctttagcagctatgcgatgcattgggtgcgtcaggcgccaggtaagggcttagagtgggtggcggttatctcttatgacggtagcaacaagtactacgccgatagcgttaaaggccgcttcacgattagccgcgacaacagcaaaaataccttatacttacagatgaattctttacgcgccgaggatacggccgtttattattgtgccaaatctggtaagtaccgccgcttcggcatttacccagattacatggatgtgtggggccaatggggtcaaggcaccctggtgacggtttcttctggtggctcttctcgtagcagctctagcggcggtggcggcagcggtggcggcggtgaaattgtgctgacccagagcccggccacgctgtctttaagcccgggcgagcgtgccacgttaagctgtcgcgccagccaaagcgttagctctagctatttagcctggtatcaacagaagccaggccaggcgccacgtttattaatctatggtgcctcttctcgtgcgaccggtattccggcgcgctttagcggctctggtagcggcaccgacttcaccctgacgatctctcgtttagagccggaggatttcgcggtgtactattgtcaacaaagctatagccaaccaatcacgtttggtcagggcaccaaggttgagattaaa

SEQ ID NO: 339 - DNA, 765 bp, synthetic construct
  source 1..765: mol_type = other DNA
caggtgcagttagttgaaagcggcggtggtgtggtgcaaccgggtcgtagcttacgtttatcttgcgcggcctctggctttacctttagcagctatgcgatgcattgggtgcgtcaggcgccaggtaagggcttagagtgggtggcggttatctcttatgacggtagcaacaagtactacgccgatagcgttaaaggccgcttcacgattagccgcgacaacagcaaaaataccttatacttacagatgaattctttacgcgccgaggatacggccgtttattattgtgccaaatctaagacgtaccgcacgggtaccccgccagccccggccatggattattggggccaatggggtcaaggcaccctggtgacggtttcttctggtggctcttctcgtagcagctctagcggcggtggcggcagcggtggcggcggtgaaattgtgctgacccagagcccggccacgctgtctttaagcccgggcgagcgtgccacgttaagctgtcgcgccagccaaagcgttagctctagctatttagcctggtatcaacagaagccaggccaggcgccacgtttattaatctatggtgcctcttctcgtgcgaccggtattccggcgcgctttagcggctctggtagcggcaccgacttcaccctgacgatctctcgtttagagccggaggatttcgcggtgtactattgttcttcttatattagctctggtacgtacgtgttcggccagggcacgaaggttgaaatcaaa

SEQ ID NO: 340 - DNA, 738 bp, synthetic construct
  source 1..738: mol_type = other DNA
caggtgcagttagttgaaagcggcggtggtgtggtgcaaccgggtcgtagcttacgtttatcttgcgcggcctctggctttacctttagcagctatgcgatgcattgggtgcgtcaggcgccaggtaagggcttagagtgggtggcggttatctcttatgacggtagcaacaagtactacgccgatagcgttaaaggccgcttcacgattagccgcgacaacagcaaaaataccttatacttacagatgaattctttacgcgccgaggatacggccgtttattattgtgccaaatctttatggggtggtttcgactactggggccagtggggtcaaggcacgctggtgaccgtttcttctggcggcagcagccgctcttcttcttctggcggtggtggcagcggcggtggcggcgagattgtgctgacgcagagcccagcgaccctgagcctgagcccgggcgagcgcgcgacgttaagctgccgtgccagccaatctgttagctcttcttacctggcctggtatcaacagaagccgggccaagccccgcgcctgttaatctatggcgcgtctagccgcgccacgggcatcccagcccgctttagcggctctggcagcggcacggattttaccttaacgattagccgtttagagccggaagacttcgccgtgtactactgccaagcgtgggacaataattctggcgttttcggtcagggcaccaaggttgagatcaaa

SEQ ID NO: 341 - DNA, 741 bp, synthetic construct
  source 1..741: mol_type = other DNA
caggtgcagttagttgaaagcggcggtggtgtggtgcaaccgggtcgtagcttacgtttatcttgcgcggcctctggctttacctttagcagctatgcgatgcattgggtgcgtcaggcgccaggtaagggcttagagtgggtggcggttatctcttatgacggtagcaacaagtactacgccgatagcgttaaaggccgcttcacgattagccgcgacaacagcaaaaataccttatacttacagatgaattctttacgcgccgaggatacggccgtttattattgtgccaaatctttatggggtggtttcgactactggggccagtggggtcaaggcacgctggtgaccgtttcttctggcggcagcagccgctcttcttcttctggcggtggtggcagcggcggtggcggcgagattgtgctgacgcagagcccagcgaccctgagcctgagcccgggcgagcgcgcgacgttaagctgccgtgccagccaatctgttagctcttcttacctggcctggtatcaacagaagccgggccaagccccgcgcctgttaatctatggcgcgtctagccgcgccacgggcatcccagcccgctttagcggctctggcagcggcacggattttaccttaacgattagccgtttagagccggaagacttcgccgtgtactactgccaagcgtgggacagcagctctagcgccgttttcggccagggcacgaaggttgagattaaa

SEQ ID NO: 342 - DNA, 738 bp, synthetic construct
  source 1..738: mol_type = other DNA
caggtgcagttagttgaaagcggcggtggtgtggtgcaaccgggtcgtagcttacgtttatcttgcgcggcctctggctttacctttagcagctatgcgatgcattgggtgcgtcaggcgccaggtaagggcttagagtgggtggcggttatctcttatgacggtagcaacaagtactacgccgatagcgttaaaggccgcttcacgattagccgcgacaacagcaaaaataccttatacttacagatgaattctttacgcgccgaggatacggccgtttattattgtgccaaatctttatggggtggtttcgactactggggccagtggggtcaaggcacgctggtgaccgtttcttctggcggcagcagccgctcttcttcttctggcggtggtggcagcggcggtggcggcgagattgtgctgacgcagagcccagcgaccctgagcctgagcccgggcgagcgcgcgacgttaagctgccgtgccagccaatctgttagctcttcttacctggcctggtatcaacagaagccgggccaagccccgcgcctgttaatctatggcgcgtctagccgcgccacgggcatcccagcccgctttagcggctctggcagcggcacggattttaccttaacgattagccgtttagagccggaagacttcgccgtgtactactgccaagcgtgggacagcagcacggtggttttcggtcagggcaccaaggttgagatcaaa

SEQ ID NO: 343 - DNA, 744 bp, synthetic construct
  source 1..744: mol_type = other DNA
caggtgcagttagttgaaagcggcggtggtgtggtgcaaccgggtcgtagcttacgtttatcttgcgcggcctctggctttacctttagcagctatgcgatgcattgggtgcgtcaggcgccaggtaagggcttagagtgggtggcggttatctcttatgacggtagcaacaagtactacgccgatagcgttaaaggccgcttcacgattagccgcgacaacagcaaaaataccttatacttacagatgaattctttacgcgccgaggatacggccgtttattattgtgccaaatctttatacggtggtatggactactggggccagtggggtcaaggcacgctggtgaccgtttcttctggcggcagcagccgctcttcttcttctggcggtggtggcagcggcggtggcggcgagattgtgctgacgcagagcccagcgaccctgagcctgagcccgggcgagcgcgcgacgttaagctgccgtgccagccaatctgttagctcttcttacctggcctggtatcaacagaagccgggccaagccccgcgcctgttaatctatggcgcgtctagccgcgccacgggcatcccagcccgctttagcggctctggcagcggcacggattttaccttaacgattagccgtttagagccggaagacttcgccgtgtactactgccaaacctgggacagccgtttaaattctgccgtttttggccagggtacgaaggttgaaatcaaa

SEQ ID NO: 344 - DNA, 762 bp, synthetic construct
  source 1..762: mol_type = other DNA
caggtgcagttagttgaaagcggcggtggtgtggtgcaaccgggtcgtagcttacgtttatcttgcgcggcctctggctttacctttagcagctatgcgatgcattgggtgcgtcaggcgccaggtaagggcttagagtgggtggcggttatctcttatgacggtagcaacaagtactacgccgatagcgttaaaggccgcttcacgattagccgcgacaacagcaaaaataccttatacttacagatgaattctttacgcgccgaggatacggccgtttattattgtgccaaatcttctttaatggttcgcggtgacatggtgccgcacttcgattactggggccagtggggccaaggtacgctggtgaccgtgtcttctggtggttctagccgctctagcagcagcggtggcggcggtagcggcggcggtggcgaaatcgtgctgacccagagcccggcgaccttatctctgtctccaggcgaacgtgccaccttatcttgtcgtgcctctcaaagcgttagctctagctacctggcgtggtaccaacagaagccgggtcaagcgccgcgtttactgatctacggtgcgtcttctcgcgccaccggcattccagcgcgtttttctggcagcggctctggtaccgattttacgttaaccatttctcgcttagaaccagaggatttcgcggtttattattgtcaggcctgggactctagcagcattgttgttttcggtcagggtaccaaagtggagatcaaa

SEQ ID NO: 345 - DNA, 753 bp, synthetic construct
  source 1..753: mol_type = other DNA
caggtgcagttagttgaaagcggcggtggtgtggtgcaaccgggtcgtagcttacgtttatcttgcgcggcctctggctttacctttagcagctatgcgatgcattgggtgcgtcaggcgccaggtaagggcttagagtgggtggcggttatctcttatgacggtagcaacaagtactacgccgatagcgttaaaggccgcttcacgattagccgcgacaacagcaaaaataccttatacttacagatgaattctttacgcgccgaggatacggccgtttattattgtgccaaagttatcccagagaaggttgccggcctggaccactggggccaatggggccagggcacgttagttaccgtgagcagcggtggttcttctcgcagctcttctagcggcggcggtggcagcggtggcggcggcgagattgtgttaacccagagcccggcgaccctgagcttatctccgggtgagcgtgcgaccttaagctgtcgcgccagccaatctgttagctctagctacctggcctggtatcagcaaaagccgggtcaggccccacgtctgctgatctatggtgcctctagccgcgccacgggtattccggcgcgctttagcggctctggcagcggcacggactttaccctgacgatcagccgtttagagccagaagacttcgcggtttattactgccagttatgggatgacacgaacacccaggtgttattcggtcaaggcacgaaagtggaaatcaaa

SEQ ID NO: 346 - DNA, 753 bp, synthetic construct
  source 1..753: mol_type = other DNA
caggtgcagttagttgaaagcggcggtggtgtggtgcaaccgggtcgtagcttacgtttatcttgcgcggcctctggctttacctttagcagctatgcgatgcattgggtgcgtcaggcgccaggtaagggcttagagtgggtggcggttatctcttatgacggtagcaacaagtactacgccgatagcgttaaaggccgcttcacgattagccgcgacaacagcaaaaataccttatacttacagatgaattctttacgcgccgaggatacggccgtttattattgtgccaaagttatcccagagaaggttgccggcctggactcttggggccaatggggccagggcacgttagttaccgtgagcagcggtggttcttctcgcagctcttctagcggcggcggtggcagcggtggcggcggcgagattgtgttaacccagagcccggcgaccctgagcttatctccgggtgagcgtgcgaccttaagctgtcgcgccagccaatctgttagctctagctacctggcctggtatcagcaaaagccgggtcaggccccacgtctgctgatctatggtgcctctagccgcgccacgggtattccggcgcgctttagcggctctggcagcggcacggactttaccctgacgatcagccgtttagagccagaagacttcgcggtttattactgccaggcctgggattcttcttctgcgcatctggttttcggtcaaggcacgaaagtggaaatcaaa

SEQ ID NO: 347 - DNA, 747 bp, synthetic construct
  source 1..747: mol_type = other DNA
caggtgcagttagttgaaagcggcggtggtgtggtgcaaccgggtcgtagcttacgtttatcttgcgcggcctctggctttacctttagcagctatgcgatgcattgggtgcgtcaggcgccaggtaagggcttagagtgggtggcggttatctcttatgacggtagcaacaagtactacgccgatagcgttaaaggccgcttcacgattagccgcgacaacagcaaaaataccttatacttacagatgaattctttacgcgccgaggatacggccgtttattattgtgccaaagtttctgccggtgttggtgcctttgattactggggtcagtggggtcagggcaccttagttacggtgagcagcggcggttcttctcgctctagctcttctggcggcggcggtagcggcggtggcggcgaaatcgtgctgacgcagagcccggcgaccctgagcctgtctccaggcgagcgcgcgaccctgtcttgccgcgcctctcagtctgtttctagctcttatttagcgtggtaccagcagaagccaggccaagcgccacgcctgctgatttacggcgcctcttctcgtgccacgggtatcccggcgcgtttcagcggcagcggtagcggcaccgacttcaccctgaccatctctcgtctggagccagaggatttcgccgtgtactattgtcagagctacacccaccgcggtgtggaagtgttcggtcaaggtaccaaggtggaaattaaa

SEQ ID NO: 348 - DNA, 747 bp, synthetic construct
  source 1..747: mol_type = other DNA
caggtgcagttagttgaaagcggcggtggtgtggtgcaaccgggtcgtagcttacgtttatcttgcgcggcctctggctttacctttagcagctatgcgatgcattgggtgcgtcaggcgccaggtaagggcttagagtgggtggcggttatctcttatgacggtagcaacaagtactacgccgatagcgttaaaggccgcttcacgattagccgcgacaacagcaaaaataccttatacttacagatgaattctttacgcgccgaggatacggccgtttattattgtgccaaatactctgccccaggttacgccgattattggggtcaatggggccaaggcaccctggttacggttagcagcggcggctcttctcgctcttctagctctggtggcggcggctctggcggcggtggcgaaattgttctgacccaaagcccggcgaccctgagcctgagcccaggtgaacgcgccaccctgagctgtcgtgcctctcaaagcgtttcttctagctacctggcctggtatcaacagaaaccaggtcaggccccgcgcttactgatttatggtgcgtcttctcgcgcgacgggtatcccagcgcgtttttctggcagcggctctggcaccgatttcacgctgaccatttctcgcctggaaccagaggactttgccgtttattactgctctagctatacgagctcttcttctctgggcgtgttcggtcaaggtaccaaggtggaaattaaa

SEQ ID NO: 349 - DNA, 753 bp, synthetic construct
  source 1..753: mol_type = other DNA
caggtgcagttagttgaaagcggcggtggtgtggtgcaaccgggtcgtagcttacgtttatcttgcgcggcctctggctttacctttagcagctatgcgatgcattgggtgcgtcaggcgccaggtaagggcttagagtgggtggcggttatctcttatgacggtagcaacaagtactacgccgatagcgttaaaggccgcttcacgattagccgcgacaacagcaaaaataccttatacttacagatgaattctttacgcgccgaggatacggccgtttattattgtgccctgggttcttactggacgggtccatggaaggattattggggtcaatggggccaaggcaccctggttacggttagcagcggcggctcttctcgctcttctagctctggtggcggcggctctggcggcggtggcgaaattgttctgacccaaagcccggcgaccctgagcctgagcccaggtgaacgcgccaccctgagctgtcgtgcctctcaaagcgtttcttctagctacctggcctggtatcaacagaaaccaggtcaggccccgcgcttactgatttatggtgcgtcttctcgcgcgacgggtatcccagcgcgtttttctggcagcggctctggcaccgatttcacgctgaccatttctcgcctggaaccagaggactttgccgtttattactgccaagtgtgggattctagcacggaccaatgggtgtttggccaaggtacgaaggtggagattaaa

SEQ ID NO: 350 - DNA, 747 bp, synthetic construct
  source 1..747: mol_type = other DNA
caggtgcagttagttgaaagcggcggtggtgtggtgcaaccgggtcgtagcttacgtttatcttgcgcggcctctggctttacctttagcagctatgcgatgcattgggtgcgtcaggcgccaggtaagggcttagagtgggtggcggttatctcttatgacggtagcaacaagtactacgccgatagcgttaaaggccgcttcacgattagccgcgacaacagcaaaaataccttatacttacagatgaattctttacgcgccgaggatacggccgtttattattgtgccaatcacaagccatacggtttcgactattggggccaatggggtcagggtaccctggtgacggtttctagcggcggcagctctcgctcttcttctagcggtggtggcggcagcggtggcggcggtgaaattgtgttaacccagtctccggcgaccctgagcctgagcccgggtgagcgtgccacgctgagctgccgcgcgtctcaatctgtgtcttcttcttatttagcgtggtaccagcaaaaaccgggtcaagcgccacgtttattaatttatggcgccagctctcgcgccaccggtatcccagcccgttttagcggtagcggcagcggtaccgattttacgttaaccattagccgcttagaaccggaggacttcgcggtttactattgtggcacgtgggatagctctagctctccaaacgtggtgtttggtcaaggtacgaaagttgaaattaaa

SEQ ID NO: 351 - DNA, 738 bp, synthetic construct
  source 1..738: mol_type = other DNA
caggtgcagttagttgaaagcggcggtggtgtggtgcaaccgggtcgtagcttacgtttatcttgcgcggcctctggctttacctttagcagctatgcgatgcattgggtgcgtcaggcgccaggtaagggcttagagtgggtggcggttatctcttatgacggtagcaacaagtactacgccgatagcgttaaaggccgcttcacgattagccgcgacaacagcaaaaataccttatacttacagatgaattctttacgcgccgaggatacggccgtttattattgtgccccgtacgccgactacttcgactactggggccagtggggtcaaggcacgctggtgaccgtttcttctggcggcagcagccgctcttcttcttctggcggtggtggcagcggcggtggcggcgagattgtgctgacgcagagcccagcgaccctgagcctgagcccgggcgagcgcgcgacgttaagctgccgtgccagccaatctgttagctcttcttacctggcctggtatcaacagaagccgggccaagccccgcgcctgttaatctatggcgcgtctagccgcgccacgggcatcccagcccgctttagcggctctggcagcggcacggattttaccttaacgattagccgtttagagccggaagacttcgccgtgtactactgccaacagtacaatagctacagccaatactcttttggccagggtacgaaggttgaaatcaaa

SEQ ID NO: 352 - DNA, 741 bp, synthetic construct
  source 1..741: mol_type = other DNA
caggtgcagttagttgaaagcggcggtggtgtggtgcaaccgggtcgtagcttacgtttatcttgcgcggcctctggctttacctttagcagctatgcgatgcattgggtgcgtcaggcgccaggtaagggcttagagtgggtggcggttatctcttatgacggtagcaacaagtactacgccgatagcgttaaaggccgcttcacgattagccgcgacaacagcaaaaataccttatacttacagatgaattctttacgcgccgaggatacggccgtttattattgtgccccgtacgccgactacttcgactactggggccagtggggtcaaggcacgctggtgaccgtttcttctggcggcagcagccgctcttcttcttctggcggtggtggcagcggcggtggcggcgagattgtgctgacgcagagcccagcgaccctgagcctgagcccgggcgagcgcgcgacgttaagctgccgtgccagccaatctgttagctcttcttacctggcctggtatcaacagaagccgggccaagccccgcgcctgttaatctatggcgcgtctagccgcgccacgggcatcccagcccgctttagcggctctggcagcggcacggattttaccttaacgattagccgtttagagccggaagacttcgccgtgtactactgccaaagccaagatagctctggcgacttccgcgtgtttggccaaggtacgaaggtggagattaaa

SEQ ID NO: 353 - DNA, 741 bp, synthetic construct
  source 1..741: mol_type = other DNA
caggtgcagttagttgaaagcggcggtggtgtggtgcaaccgggtcgtagcttacgtttatcttgcgcggcctctggctttacctttagcagctatgcgatgcattgggtgcgtcaggcgccaggtaagggcttagagtgggtggcggttatctcttatgacggtagcaacaagtactacgccgatagcgttaaaggccgcttcacgattagccgcgacaacagcaaaaataccttatacttacagatgaattctttacgcgccgaggatacggccgtttattattgtgccccgtacgccgactacttcgactactggggccagtggggtcaaggcacgctggtgaccgtttcttctggcggcagcagccgctcttcttcttctggcggtggtggcagcggcggtggcggcgagattgtgctgacgcagagcccagcgaccctgagcctgagcccgggcgagcgcgcgacgttaagctgccgtgccagccaatctgttagctcttcttacctggcctggtatcaacagaagccgggccaagccccgcgcctgttaatctatggcgcgtctagccgcgccacgggcatcccagcccgctttagcggctctggcagcggcacggattttaccttaacgattagccgtttagagccggaagacttcgccgtgtactactgccaagtgtgggacagcagctctgatgactacgtttttggccagggtacgaaggttgaaatcaaa

SEQ ID NO: 354 - DNA, 741 bp, synthetic construct
  source 1..741: mol_type = other DNA
caggtgcagttagttgaaagcggcggtggtgtggtgcaaccgggtcgtagcttacgtttatcttgcgcggcctctggctttacctttagcagctatgcgatgcattgggtgcgtcaggcgccaggtaagggcttagagtgggtggcggttatctcttatgacggtagcaacaagtactacgccgatagcgttaaaggccgcttcacgattagccgcgacaacagcaaaaataccttatacttacagatgaattctttacgcgccgaggatacggccgtttattattgtgccccgtacgccgactacttcgactactggggccagtggggtcaaggcacgctggtgaccgtttcttctggcggcagcagccgctcttcttcttctggcggtggtggcagcggcggtggcggcgagattgtgctgacgcagagcccagcgaccctgagcctgagcccgggcgagcgcgcgacgttaagctgccgtgccagccaatctgttagctcttcttacctggcctggtatcaacagaagccgggccaagccccgcgcctgttaatctatggcgcgtctagccgcgccacgggcatcccagcccgctttagcggctctggcagcggcacggattttaccttaacgattagccgtttagagccggaagacttcgccgtgtactactgccaagtgtgggacagcagctctgatcacgttgtttttggccagggtacgaaggttgaaatcaaa

SEQ ID NO: 355 - DNA, 738 bp, synthetic construct
  source 1..738: mol_type = other DNA
caggtgcagttagttgaaagcggcggtggtgtggtgcaaccgggtcgtagcttacgtttatcttgcgcggcctctggctttacctttagcagctatgcgatgcattgggtgcgtcaggcgccaggtaagggcttagagtgggtggcggttatctcttatgacggtagcaacaagtactacgccgatagcgttaaaggccgcttcacgattagccgcgacaacagcaaaaataccttatacttacagatgaattctttacgcgccgaggatacggccgtttattattgtgccccgtacgccgactacttcgactactggggccagtggggtcaaggcacgctggtgaccgtttcttctggcggcagcagccgctcttcttcttctggcggtggtggcagcggcggtggcggcgagattgtgctgacgcagagcccagcgaccctgagcctgagcccgggcgagcgcgcgacgttaagctgccgtgccagccaatctgttagctcttcttacctggcctggtatcaacagaagccgggccaagccccgcgcctgttaatctatggcgcgtctagccgcgccacgggcatcccagcccgctttagcggctctggcagcggcacggattttaccttaacgattagccgtttagagccggaagacttcgccgtgtactactgctctagctacaccagctctagcacggttgtttttggccagggtacgaaggttgaaatcaaa

SEQ ID NO: 356 - DNA, 750 bp, synthetic construct
  source 1..750: mol_type = other DNA
caggtgcagttagttgaaagcggcggtggtgtggtgcaaccgggtcgtagcttacgtttatcttgcgcggcctctggctttacctttagcagctatgcgatgcattgggtgcgtcaggcgccaggtaagggcttagagtgggtggcggttatctcttatgacggtagcaacaagtactacgccgatagcgttaaaggccgcttcacgattagccgcgacaacagcaaaaataccttatacttacagatgaattctttacgcgccgaggatacggccgtttattattgtgcccgtgccggtggtgttccacgcggttatgcgttcgactattggggtcagtggggccagggtacgttagtgaccgtgagctctggtggttcttctcgttcttctagcagcggcggtggcggctctggcggcggcggtgaaattgttctgacccagagcccggcgaccctgtctttaagcccaggtgaacgtgcgacgctgtcttgtcgcgcgtctcaatctgtgtctagctcttatttagcgtggtatcaacaaaaaccaggccaagccccgcgtctgttaatttacggtgccagctctcgcgccacgggcattccggcccgttttagcggtagcggcagcggtacggattttaccttaacgattagccgcttagagccggaggactttgccgtgtactattgccaagcgtgggactcttctaccggcgtgttcggtcaaggtaccaaggtggaaattaaa

SEQ ID NO: 357 - DNA, 750 bp, synthetic construct
  source 1..750: mol_type = other DNA
caggtgcagttagttgaaagcggcggtggtgtggtgcaaccgggtcgtagcttacgtttatcttgcgcggcctctggctttacctttagcagctatgcgatgcattgggtgcgtcaggcgccaggtaagggcttagagtgggtggcggttatctcttatgacggtagcaacaagtactacgccgatagcgttaaaggccgcttcacgattagccgcgacaacagcaaaaataccttatacttacagatgaattctttacgcgccgaggatacggccgtttattattgtgcccgtgccggtcgctctcgcggttggtacggctttgacttatggggccaatggggccagggcacgttagttaccgtgagcagcggtggttcttctcgcagctcttctagcggcggcggtggcagcggtggcggcggcgagattgtgttaacccagagcccggcgaccctgagcttatctccgggtgagcgtgcgaccttaagctgtcgcgccagccaatctgttagctctagctacctggcctggtatcagcaaaagccgggtcaggccccacgtctgctgatctatggtgcctctagccgcgccacgggtattccggcgcgctttagcggctctggcagcggcacggactttaccctgacgatcagccgtttagagccagaagacttcgcggtttattactgccaggccagcgactcttctagcgtggtgttcggtcaaggtaccaaggtggaaattaaa

SEQ ID NO: 358 - DNA, 741 bp, synthetic construct
  source 1..741: mol_type = other DNA
caggtgcagttagttgaaagcggcggtggtgtggtgcaaccgggtcgtagcttacgtttatcttgcgcggcctctggctttacctttagcagctatgcgatgcattgggtgcgtcaggcgccaggtaagggcttagagtgggtggcggttatctcttatgacggtagcaacaagtactacgccgatagcgttaaaggccgcttcacgattagccgcgacaacagcaaaaataccttatacttacagatgaattctttacgcgccgaggatacggccgtttattattgtgcccgtgccggtgttggtgccacgccagattattggggtcaatggggccaaggcaccctggttacggttagcagcggcggctcttctcgctcttctagctctggtggcggcggctctggcggcggtggcgaaattgttctgacccaaagcccggcgaccctgagcctgagcccaggtgaacgcgccaccctgagctgtcgtgcctctcaaagcgtttcttctagctacctggcctggtatcaacagaaaccaggtcaggccccgcgcttactgatttatggtgcgtcttctcgcgcgacgggtatcccagcgcgtttttctggcagcggctctggcaccgatttcacgctgaccatttctcgcctggaaccagaggactttgccgtttattactgcatgcaagcgctgcaaaccccattaacgtttggccagggtacgaaggttgaaatcaaa

SEQ ID NO: 359 - DNA, 741 bp, synthetic construct
  source 1..741: mol_type = other DNA
caggtgcagttagttgaaagcggcggtggtgtggtgcaaccgggtcgtagcttacgtttatcttgcgcggcctctggctttacctttagcagctatgcgatgcattgggtgcgtcaggcgccaggtaagggcttagagtgggtggcggttatctcttatgacggtagcaacaagtactacgccgatagcgttaaaggccgcttcacgattagccgcgacaacagcaaaaataccttatacttacagatgaattctttacgcgccgaggatacggccgtttattattgtgcccgtgccggtgttggtgccacgccagattattggggtcaatggggccaaggcaccctggttacggttagcagcggcggctcttctcgctcttctagctctggtggcggcggctctggcggcggtggcgaaattgttctgacccaaagcccggcgaccctgagcctgagcccaggtgaacgcgccaccctgagctgtcgtgcctctcaaagcgtttcttctagctacctggcctggtatcaacagaaaccaggtcaggccccgcgcttactgatttatggtgcgtcttctcgcgcgacgggtatcccagcgcgtttttctggcagcggctctggcaccgatttcacgctgaccatttctcgcctggaaccagaggactttgccgtttattactgcatgcaagcgcgtcaaagcccattaacgtttggccagggtacgaaggttgaaatcaaa

SEQ ID NO: 360 - DNA, 744 bp, synthetic construct
  source 1..744: mol_type = other DNA
caggtgcagttagttgaaagcggcggtggtgtggtgcaaccgggtcgtagcttacgtttatcttgcgcggcctctggctttacctttagcagctatgcgatgcattgggtgcgtcaggcgccaggtaagggcttagagtgggtggcggttatctcttatgacggtagcaacaagtactacgccgatagcgttaaaggccgcttcacgattagccgcgacaacagcaaaaataccttatacttacagatgaattctttacgcgccgaggatacggccgtttattattgtgcccgtgccttaacgtggaactacccattcgattattggggtcaatggggccaaggcaccctggttacggttagcagcggcggctcttctcgctcttctagctctggtggcggcggctctggcggcggtggcgaaattgttctgacccaaagcccggcgaccctgagcctgagcccaggtgaacgcgccaccctgagctgtcgtgcctctcaaagcgtttcttctagctacctggcctggtatcaacagaaaccaggtcaggccccgcgcttactgatttatggtgcgtcttctcgcgcgacgggtatcccagcgcgtttttctggcagcggctctggcaccgatttcacgctgaccatttctcgcctggaaccagaggactttgccgtttattactgccaaaaatattacagcgccccacgcacctttggccaaggtacgaaggtggagattaaa

SEQ ID NO: 361 - DNA, 762 bp, synthetic construct
  source 1..762: mol_type = other DNA
caggtgcagttagttgaaagcggcggtggtgtggtgcaaccgggtcgtagcttacgtttatcttgcgcggcctctggctttacctttagcagctatgcgatgcattgggtgcgtcaggcgccaggtaagggcttagagtgggtggcggttatctcttatgacggtagcaacaagtactacgccgatagcgttaaaggccgcttcacgattagccgcgacaacagcaaaaataccttatacttacagatgaattctttacgcgccgaggatacggccgtttattattgtgcccgtgcccaaggtgttttaacgcgcgaaagctactacggcggtatggattattggggccaatggggtcaaggcaccctggtgacggtttcttctggtggctcttctcgtagcagctctagcggcggtggcggcagcggtggcggcggtgaaattgtgctgacccagagcccggccacgctgtctttaagcccgggcgagcgtgccacgttaagctgtcgcgccagccaaagcgttagctctagctatttagcctggtatcaacagaagccaggccaggcgccacgtttattaatctatggtgcctcttctcgtgcgaccggtattccggcgcgctttagcggctctggtagcggcaccgacttcaccctgacgatctctcgtttagagccggaggatttcgcggtgtactattgtcaacaagaaaatagcccaccaatcacgtttggtcagggcaccaaggttgagattaaa

SEQ ID NO: 362 - DNA, 756 bp, synthetic construct
  source 1..756: mol_type = other DNA
caggtgcagttagttgaaagcggcggtggtgtggtgcaaccgggtcgtagcttacgtttatcttgcgcggcctctggctttacctttagcagctatgcgatgcattgggtgcgtcaggcgccaggtaagggcttagagtgggtggcggttatctcttatgacggtagcaacaagtactacgccgatagcgttaaaggccgcttcacgattagccgcgacaacagcaaaaataccttatacttacagatgaattctttacgcgccgaggatacggccgtttattattgtgcccgtgcccgcgttggtgccacgccaacccatgccttcgatatctggggccagtggggccaaggtacgctggtgaccgtgtcttctggtggttctagccgctctagcagcagcggtggcggcggtagcggcggcggtggcgaaatcgtgctgacccagagcccggcgaccttatctctgtctccaggcgaacgtgccaccttatcttgtcgtgcctctcaaagcgttagctctagctacctggcgtggtaccaacagaagccgggtcaagcgccgcgtttactgatctacggtgcgtcttctcgcgccaccggcattccagcgcgtttttctggcagcggctctggtaccgattttacgttaaccatttctcgcttagaaccagaggatttcgcggtttattattgtcgtgtttgggactctagcagcacctgggttttcggtcaaggcacgaaagtggaaatcaaa

SEQ ID NO: 363 - DNA, 765 bp, synthetic construct
  source 1..765: mol_type = other DNA
caggtgcagttagttgaaagcggcggtggtgtggtgcaaccgggtcgtagcttacgtttatcttgcgcggcctctggctttacctttagcagctatgcgatgcattgggtgcgtcaggcgccaggtaagggcttagagtgggtggcggttatctcttatgacggtagcaacaagtactacgccgatagcgttaaaggccgcttcacgattagccgcgacaacagcaaaaataccttatacttacagatgaattctttacgcgccgaggatacggccgtttattattgtgcccgtgccacgcgctacttcgactggcaatatcgttacggtatggatgtttggggccagtggggccaaggtacgctggtgaccgtgtcttctggtggttctagccgctctagcagcagcggtggcggcggtagcggcggcggtggcgaaatcgtgctgacccagagcccggcgaccttatctctgtctccaggcgaacgtgccaccttatcttgtcgtgcctctcaaagcgttagctctagctacctggcgtggtaccaacagaagccgggtcaagcgccgcgtttactgatctacggtgcgtcttctcgcgccaccggcattccagcgcgtttttctggcagcggctctggtaccgattttacgttaaccatttctcgcttagaaccagaggatttcgcggtttattattgtagctcttactctagcaccagcacgccatacgtttttggtcagggcaccaaggttgagattaaa

SEQ ID NO: 364 - DNA, 765 bp, synthetic construct
  source 1..765: mol_type = other DNA
caggtgcagttagttgaaagcggcggtggtgtggtgcaaccgggtcgtagcttacgtttatcttgcgcggcctctggctttacctttagcagctatgcgatgcattgggtgcgtcaggcgccaggtaagggcttagagtgggtggcggttatctcttatgacggtagcaacaagtactacgccgatagcgttaaaggccgcttcacgattagccgcgacaacagcaaaaataccttatacttacagatgaattctttacgcgccgaggatacggccgtttattattgtgcccgtgccacgcgctacttcgactggcaatatcgttacggtatggatgtttggggccagtggggccaaggtacgctggtgaccgtgtcttctggtggttctagccgctctagcagcagcggtggcggcggtagcggcggcggtggcgaaatcgtgctgacccagagcccggcgaccttatctctgtctccaggcgaacgtgccaccttatcttgtcgtgcctctcaaagcgttagctctagctacctggcgtggtaccaacagaagccgggtcaagcgccgcgtttactgatctacggtgcgtcttctcgcgccaccggcattccagcgcgtttttctggcagcggctctggtaccgattttacgttaaccatttctcgcttagaaccagaggatttcgcggtttattattgtagctcttacacgagcagcagctctgtttacgtttttggtcagggcaccaaggttgagattaaa

SEQ ID NO: 365 - DNA, 759 bp, synthetic construct
  source 1..759: mol_type = other DNA
caggtgcagttagttgaaagcggcggtggtgtggtgcaaccgggtcgtagcttacgtttatcttgcgcggcctctggctttacctttagcagctatgcgatgcattgggtgcgtcaggcgccaggtaagggcttagagtgggtggcggttatctcttatgacggtagcaacaagtactacgccgatagcgttaaaggccgcttcacgattagccgcgacaacagcaaaaataccttatacttacagatgaattctttacgcgccgaggatacggccgtttattattgtgcccgtgacgccgcctacggtgacgttgtgcgtccagcctttgactattggggccagtggggtcaaggtaccctggtgaccgtttcttctggtggtagctctcgcagcagcagctctggcggcggtggcagcggcggtggcggcgagattgtgctgacccagagcccggcgacgttaagcttatctccgggcgaacgcgcgacgttatcttgccgcgcctctcagtctgtgtctagctcttatctggcctggtaccagcaaaaaccaggtcaggcgccgcgcctgttaatctacggcgcctcttctcgcgcgaccggcatcccggcgcgtttcagcggcagcggttctggcaccgatttcacgctgaccatctctcgcctggagccagaagactttgccgtgtattactgcgacgttgccgtgaccgatggtcgctgggttttcggccaaggcaccaaagttgagatcaaa

SEQ ID NO: 366 - DNA, 759 bp, synthetic construct
  source 1..759: mol_type = other DNA
caggtgcagttagttgaaagcggcggtggtgtggtgcaaccgggtcgtagcttacgtttatcttgcgcggcctctggctttacctttagcagctatgcgatgcattgggtgcgtcaggcgccaggtaagggcttagagtgggtggcggttatctcttatgacggtagcaacaagtactacgccgatagcgttaaaggccgcttcacgattagccgcgacaacagcaaaaataccttatacttacagatgaattctttacgcgccgaggatacggccgtttattattgtgcccgtgacgccgcctacggtgacgttgtgcgtccagcctttgactattggggccagtggggtcaaggtaccctggtgaccgtttcttctggtggtagctctcgcagcagcagctctggcggcggtggcagcggcggtggcggcgagattgtgctgacccagagcccggcgacgttaagcttatctccgggcgaacgcgcgacgttatcttgccgcgcctctcagtctgtgtctagctcttatctggcctggtaccagcaaaaaccaggtcaggcgccgcgcctgttaatctacggcgcctcttctcgcgcgaccggcatcccggcgcgtttcagcggcagcggttctggcaccgatttcacgctgaccatctctcgcctggagccagaagactttgccgtgtattactgccaagcctgggacagcaatccggccgttgttttcggccaaggcaccaaagttgagatcaaa

SEQ ID NO: 367 - DNA, 759 bp, synthetic construct
  source 1..759: mol_type = other DNA
caggtgcagttagttgaaagcggcggtggtgtggtgcaaccgggtcgtagcttacgtttatcttgcgcggcctctggctttacctttagcagctatgcgatgcattgggtgcgtcaggcgccaggtaagggcttagagtgggtggcggttatctcttatgacggtagcaacaagtactacgccgatagcgttaaaggccgcttcacgattagccgcgacaacagcaaaaataccttatacttacagatgaattctttacgcgccgaggatacggccgtttattattgtgcccgtgacgccgcctacggtgacgttgtgcgtccagcctttgactattggggccagtggggtcaaggtaccctggtgaccgtttcttctggtggtagctctcgcagcagcagctctggcggcggtggcagcggcggtggcggcgagattgtgctgacccagagcccggcgacgttaagcttatctccgggcgaacgcgcgacgttatcttgccgcgcctctcagtctgtgtctagctcttatctggcctggtaccagcaaaaaccaggtcaggcgccgcgcctgttaatctacggcgcctcttctcgcgcgaccggcatcccggcgcgtttcagcggcagcggttctggcaccgatttcacgctgaccatctctcgcctggagccagaagactttgccgtgtattactgctctgccgttggcggcagcgcccgctgggttttcggccaaggcaccaaagttgagatcaaa

SEQ ID NO: 368 - DNA, 759 bp, synthetic construct
  source 1..759: mol_type = other DNA
caggtgcagttagttgaaagcggcggtggtgtggtgcaaccgggtcgtagcttacgtttatcttgcgcggcctctggctttacctttagcagctatgcgatgcattgggtgcgtcaggcgccaggtaagggcttagagtgggtggcggttatctcttatgacggtagcaacaagtactacgccgatagcgttaaaggccgcttcacgattagccgcgacaacagcaaaaataccttatacttacagatgaattctttacgcgccgaggatacggccgtttattattgtgcccgtgacgccttccgctacgacccacgtggcgagtacggcttagattattggggccaatggggtcaaggcaccctggtgacggtttcttctggtggctcttctcgtagcagctctagcggcggtggcggcagcggtggcggcggtgaaattgtgctgacccagagcccggccacgctgtctttaagcccgggcgagcgtgccacgttaagctgtcgcgccagccaaagcgttagctctagctatttagcctggtatcaacagaagccaggccaggcgccacgtttattaatctatggtgcctcttctcgtgcgaccggtattccggcgcgctttagcggctctggtagcggcaccgacttcaccctgacgatctctcgtttagagccggaggatttcgcggtgtactattgtcaaacgtggggcaatacccacttagttttcggccaaggcaccaaagttgagatcaaa

SEQ ID NO: 369 - DNA, 741 bp, synthetic construct
  source 1..741: mol_type = other DNA
caggtgcagttagttgaaagcggcggtggtgtggtgcaaccgggtcgtagcttacgtttatcttgcgcggcctctggctttacctttagcagctatgcgatgcattgggtgcgtcaggcgccaggtaagggcttagagtgggtggcggttatctcttatgacggtagcaacaagtactacgccgatagcgttaaaggccgcttcacgattagccgcgacaacagcaaaaataccttatacttacagatgaattctttacgcgccgaggatacggccgtttattattgtgcccgtgacgcccgctacgttccagacgatggctggggtcaatggggccaaggcaccctggttacggttagcagcggcggctcttctcgctcttctagctctggtggcggcggctctggcggcggtggcgaaattgttctgacccaaagcccggcgaccctgagcctgagcccaggtgaacgcgccaccctgagctgtcgtgcctctcaaagcgtttcttctagctacctggcctggtatcaacagaaaccaggtcaggccccgcgcttactgatttatggtgcgtcttctcgcgcgacgggtatcccagcgcgtttttctggcagcggctctggcaccgatttcacgctgaccatttctcgcctggaaccagaggactttgccgtttattactgccaagcgtgggattctagcacgtacgtttttggccagggtacgaaggttgaaatcaaa

SEQ ID NO: 370 - DNA, 741 bp, synthetic construct
  source 1..741: mol_type = other DNA
caggtgcagttagttgaaagcggcggtggtgtggtgcaaccgggtcgtagcttacgtttatcttgcgcggcctctggctttacctttagcagctatgcgatgcattgggtgcgtcaggcgccaggtaagggcttagagtgggtggcggttatctcttatgacggtagcaacaagtactacgccgatagcgttaaaggccgcttcacgattagccgcgacaacagcaaaaataccttatacttacagatgaattctttacgcgccgaggatacggccgtttattattgtgcccgtgacgcccgctacgttccagacgatggctggggtcaatggggccaaggcaccctggttacggttagcagcggcggctcttctcgctcttctagctctggtggcggcggctctggcggcggtggcgaaattgttctgacccaaagcccggcgaccctgagcctgagcccaggtgaacgcgccaccctgagctgtcgtgcctctcaaagcgtttcttctagctacctggcctggtatcaacagaaaccaggtcaggccccgcgcttactgatttatggtgcgtcttctcgcgcgacgggtatcccagcgcgtttttctggcagcggctctggcaccgatttcacgctgaccatttctcgcctggaaccagaggactttgccgtttattactgccaagtgggcgacagctctacggttctgtttggccaaggtacgaaggtggagattaaa

SEQ ID NO: 371 - DNA, 759 bp, synthetic construct
  source 1..759: mol_type = other DNA
caggtgcagttagttgaaagcggcggtggtgtggtgcaaccgggtcgtagcttacgtttatcttgcgcggcctctggctttacctttagcagctatgcgatgcattgggtgcgtcaggcgccaggtaagggcttagagtgggtggcggttatctcttatgacggtagcaacaagtactacgccgatagcgttaaaggccgcttcacgattagccgcgacaacagcaaaaataccttatacttacagatgaattctttacgcgccgaggatacggccgtttattattgtgcccgtgacgactcttaccgcggtccactgcatggttactttgactattggggccagtggggtcaaggtaccctggtgaccgtttcttctggtggtagctctcgcagcagcagctctggcggcggtggcagcggcggtggcggcgagattgtgctgacccagagcccggcgacgttaagcttatctccgggcgaacgcgcgacgttatcttgccgcgcctctcagtctgtgtctagctcttatctggcctggtaccagcaaaaaccaggtcaggcgccgcgcctgttaatctacggcgcctcttctcgcgcgaccggcatcccggcgcgtttcagcggcagcggttctggcaccgatttcacgctgaccatctctcgcctggagccagaagactttgccgtgtattactgccaagcctgggacagcagcaccttagttgttttcggccaaggcaccaaagttgagatcaaa

SEQ ID NO: 372 - DNA, 756 bp, synthetic construct
  source 1..756: mol_type = other DNA
caggtgcagttagttgaaagcggcggtggtgtggtgcaaccgggtcgtagcttacgtttatcttgcgcggcctctggctttacctttagcagctatgcgatgcattgggtgcgtcaggcgccaggtaagggcttagagtgggtggcggttatctcttatgacggtagcaacaagtactacgccgatagcgttaaaggccgcttcacgattagccgcgacaacagcaaaaataccttatacttacagatgaattctttacgcgccgaggatacggccgtttattattgtgcccgtgacgactcttaccgcggtccactgcatggttactttgactattggggccagtggggtcaaggtaccctggtgaccgtttcttctggtggtagctctcgcagcagcagctctggcggcggtggcagcggcggtggcggcgagattgtgctgacccagagcccggcgacgttaagcttatctccgggcgaacgcgcgacgttatcttgccgcgcctctcagtctgtgtctagctcttatctggcctggtaccagcaaaaaccaggtcaggcgccgcgcctgttaatctacggcgcctcttctcgcgcgaccggcatcccggcgcgtttcagcggcagcggttctggcaccgatttcacgctgaccatctctcgcctggagccagaagactttgccgtgtattactgccaaacgtgggacagctttggccaagttttcggtcagggtaccaaagtggagatcaaa

SEQ ID NO: 373 - DNA, 762 bp, synthetic construct
  source 1..762: mol_type = other DNA
caggtgcagttagttgaaagcggcggtggtgtggtgcaaccgggtcgtagcttacgtttatcttgcgcggcctctggctttacctttagcagctatgcgatgcattgggtgcgtcaggcgccaggtaagggcttagagtgggtggcggttatctcttatgacggtagcaacaagtactacgccgatagcgttaaaggccgcttcacgattagccgcgacaacagcaaaaataccttatacttacagatgaattctttacgcgccgaggatacggccgtttattattgtgcccgtgacgactcttaccgcggtccactgcatggttactttgactattggggccagtggggtcaaggtaccctggtgaccgtttcttctggtggtagctctcgcagcagcagctctggcggcggtggcagcggcggtggcggcgagattgtgctgacccagagcccggcgacgttaagcttatctccgggcgaacgcgcgacgttatcttgccgcgcctctcagtctgtgtctagctcttatctggcctggtaccagcaaaaaccaggtcaggcgccgcgcctgttaatctacggcgcctcttctcgcgcgaccggcatcccggcgcgtttcagcggcagcggttctggcaccgatttcacgctgaccatctctcgcctggagccagaagactttgccgtgtattactgccaaacgtacgatgataatcgctctgccgttgtgttcggccagggcacgaaggttgaaatcaaa

SEQ ID NO: 374 - DNA, 744 bp, synthetic construct
  source 1..744: mol_type = other DNA
caggtgcagttagttgaaagcggcggtggtgtggtgcaaccgggtcgtagcttacgtttatcttgcgcggcctctggctttacctttagcagctatgcgatgcattgggtgcgtcaggcgccaggtaagggcttagagtgggtggcggttatctcttatgacggtagcaacaagtactacgccgatagcgttaaaggccgcttcacgattagccgcgacaacagcaaaaataccttatacttacagatgaattctttacgcgccgaggatacggccgtttattattgtgcccgtgacggtgcctctggtgacttagattattggggtcaatggggccaaggcaccctggttacggttagcagcggcggctcttctcgctcttctagctctggtggcggcggctctggcggcggtggcgaaattgttctgacccaaagcccggcgaccctgagcctgagcccaggtgaacgcgccaccctgagctgtcgtgcctctcaaagcgtttcttctagctacctggcctggtatcaacagaaaccaggtcaggccccgcgcttactgatttatggtgcgtcttctcgcgcgacgggtatcccagcgcgtttttctggcagcggctctggcaccgatttcacgctgaccatttctcgcctggaaccagaggactttgccgtttattactgccaacagctgaacacctacccaccatggacctttggccaaggtacgaaggtggagattaaa

SEQ ID NO: 375 - DNA, 744 bp, synthetic construct
  source 1..744: mol_type = other DNA
caggtgcagttagttgaaagcggcggtggtgtggtgcaaccgggtcgtagcttacgtttatcttgcgcggcctctggctttacctttagcagctatgcgatgcattgggtgcgtcaggcgccaggtaagggcttagagtgggtggcggttatctcttatgacggtagcaacaagtactacgccgatagcgttaaaggccgcttcacgattagccgcgacaacagcaaaaataccttatacttacagatgaattctttacgcgccgaggatacggccgtttattattgtgcccgtgacggtggtggtgactacggttttgatccatggggtcagtggggtcagggcaccttagttacggtgagcagcggcggttcttctcgctctagctcttctggcggcggcggtagcggcggtggcggcgaaatcgtgctgacgcagagcccggcgaccctgagcctgtctccaggcgagcgcgcgaccctgtcttgccgcgcctctcagtctgtttctagctcttatttagcgtggtaccagcagaagccaggccaagcgccacgcctgctgatttacggcgcctcttctcgtgccacgggtatcccggcgcgtttcagcggcagcggtagcggcaccgacttcaccctgaccatctctcgtctggagccagaggatttcgccgtgtactattgtcagcagtacgatcgcttaccactgacctttggtcaaggtacgaaagttgaaattaaa

SEQ ID NO: 376 - DNA, 747 bp, synthetic construct
  source 1..747: mol_type = other DNA
caggtgcagttagttgaaagcggcggtggtgtggtgcaaccgggtcgtagcttacgtttatcttgcgcggcctctggctttacctttagcagctatgcgatgcattgggtgcgtcaggcgccaggtaagggcttagagtgggtggcggttatctcttatgacggtagcaacaagtactacgccgatagcgttaaaggccgcttcacgattagccgcgacaacagcaaaaataccttatacttacagatgaattctttacgcgccgaggatacggccgtttattattgtgcccgtgacggtggtacggccgccttcgattattggggtcaatggggccaaggcaccctggttacggttagcagcggcggctcttctcgctcttctagctctggtggcggcggctctggcggcggtggcgaaattgttctgacccaaagcccggcgaccctgagcctgagcccaggtgaacgcgccaccctgagctgtcgtgcctctcaaagcgtttcttctagctacctggcctggtatcaacagaaaccaggtcaggccccgcgcttactgatttatggtgcgtcttctcgcgcgacgggtatcccagcgcgtttttctggcagcggctctggcaccgatttcacgctgaccatttctcgcctggaaccagaggactttgccgtttattactgctctagctatacgagctcttctccactggtggtgttcggtcaaggtaccaaggtggaaattaaa

SEQ ID NO: 377 - DNA, 759 bp, synthetic construct
  source 1..759: mol_type = other DNA
caggtgcagttagttgaaagcggcggtggtgtggtgcaaccgggtcgtagcttacgtttatcttgcgcggcctctggctttacctttagcagctatgcgatgcattgggtgcgtcaggcgccaggtaagggcttagagtgggtggcggttatctcttatgacggtagcaacaagtactacgccgatagcgttaaaggccgcttcacgattagccgcgacaacagcaaaaataccttatacttacagatgaattctttacgcgccgaggatacggccgtttattattgtgcccgtgacggtggttaccgccgcacgaattattggttcgactattggggtcagtggggccagggtacgttagtgaccgtgagctctggtggttcttctcgttcttctagcagcggcggtggcggctctggcggcggcggtgaaattgttctgacccagagcccggcgaccctgtctttaagcccaggtgaacgtgcgacgctgtcttgtcgcgcgtctcaatctgtgtctagctcttatttagcgtggtatcaacaaaaaccaggccaagccccgcgtctgttaatttacggtgccagctctcgcgccacgggcattccggcccgttttagcggtagcggcagcggtacggattttaccttaacgattagccgcttagagccggaggactttgccgtgtactattgcaacagccgcgactctgatagccatcaagccgttttcggccaaggcaccaaagttgagatcaaa

SEQ ID NO: 378 - DNA, 741 bp, synthetic construct
  source 1..741: mol_type = other DNA
caggtgcagttagttgaaagcggcggtggtgtggtgcaaccgggtcgtagcttacgtttatcttgcgcggcctctggctttacctttagcagctatgcgatgcattgggtgcgtcaggcgccaggtaagggcttagagtgggtggcggttatctcttatgacggtagcaacaagtactacgccgatagcgttaaaggccgcttcacgattagccgcgacaacagcaaaaataccttatacttacagatgaattctttacgcgccgaggatacggccgtttattattgtgcccgtgacggtcgcgccccagcctctgattattggggtcaatggggccaaggcaccctggttacggttagcagcggcggctcttctcgctcttctagctctggtggcggcggctctggcggcggtggcgaaattgttctgacccaaagcccggcgaccctgagcctgagcccaggtgaacgcgccaccctgagctgtcgtgcctctcaaagcgtttcttctagctacctggcctggtatcaacagaaaccaggtcaggccccgcgcttactgatttatggtgcgtcttctcgcgcgacgggtatcccagcgcgtttttctggcagcggctctggcaccgatttcacgctgaccatttctcgcctggaaccagaggactttgccgtttattactgctctagctatacgagctcttctgttgtgtttggccaaggtacgaaggtggagattaaa

SEQ ID NO: 379 - DNA, 780 bp, synthetic construct
  source 1..780: mol_type = other DNA
caggtgcagttagttgaaagcggcggtggtgtggtgcaaccgggtcgtagcttacgtttatcttgcgcggcctctggctttacctttagcagctatgcgatgcattgggtgcgtcaggcgccaggtaagggcttagagtgggtggcggttatctcttatgacggtagcaacaagtactacgccgatagcgttaaaggccgcttcacgattagccgcgacaacagcaaaaataccttatacttacagatgaattctttacgcgccgaggatacggccgtttattattgtgcccgtgacggttacttctaccgccgcaatgtgacgatgtactattctagctatatggattactggggtcaatggggccagggcaccttagttacggtttctagcggtggtagcagccgttctagcagctctggcggcggcggtagcggcggtggcggcgaaattgtgctgacccagtctccagcgacgttaagcctgagcccaggcgagcgcgccaccttatcttgtcgtgccagccaaagcgttagcagctcttacctggcctggtatcaacaaaaaccgggccaagcgccacgcttactgatctacggtgccagcagccgtgccaccggcattccagcgcgtttttctggtagcggcagcggtacggattttacgttaacgatttctcgcctggagccggaggattttgccgtgtactactgtcagagctatgactcttctttaagcggtgatgtggtgttcggtcaaggcacgaaggtggagattaaa

SEQ ID NO: 380 - DNA, 771 bp, synthetic construct
  source 1..771: mol_type = other DNA
caggtgcagttagttgaaagcggcggtggtgtggtgcaaccgggtcgtagcttacgtttatcttgcgcggcctctggctttacctttagcagctatgcgatgcattgggtgcgtcaggcgccaggtaagggcttagagtgggtggcggttatctcttatgacggtagcaacaagtactacgccgatagcgttaaaggccgcttcacgattagccgcgacaacagcaaaaataccttatacttacagatgaattctttacgcgccgaggatacggccgtttattattgtgcccgtgacggttacttctaccgccgcaatgtgacgacgtataacagcagctatatggactactggggtcagtggggccagggcacgttagttacggttagctctggtggcagcagccgcagcagctctagcggcggcggtggcagcggtggcggcggcgaaattgtgctgacccaatctccggccacgctgagcctgtctccgggtgagcgcgcgacgttatcttgccgcgcgtctcagtctgtgagctcttcttatttagcgtggtaccaacagaaaccgggtcaggccccacgcctgttaatctacggtgcgagcagccgcgcgaccggcatcccggcgcgtttctctggcagcggctctggtaccgatttcacgttaaccatctctcgtttagaaccagaagatttcgcggtttactactgccagcagtcttactctccaccgccaacctttggccaaggtacgaaagttgagattaaa

SEQ ID NO: 381 - DNA, 780 bp, synthetic construct
  source 1..780: mol_type = other DNA
caggtgcagttagttgaaagcggcggtggtgtggtgcaaccgggtcgtagcttacgtttatcttgcgcggcctctggctttacctttagcagctatgcgatgcattgggtgcgtcaggcgccaggtaagggcttagagtgggtggcggttatctcttatgacggtagcaacaagtactacgccgatagcgttaaaggccgcttcacgattagccgcgacaacagcaaaaataccttatacttacagatgaattctttacgcgccgaggatacggccgtttattattgtgcccgtgacggttacttctaccgccgcaatgtgacgacgtattacagcagctatatggactactggggtcagtggggccagggcacgttagttacggttagctctggtggcagcagccgcagcagctctagcggcggcggtggcagcggtggcggcggcgaaattgtgctgacccaatctccggccacgctgagcctgtctccgggtgagcgcgcgacgttatcttgccgcgcgtctcagtctgtgagctcttcttatttagcgtggtaccaacagaaaccgggtcaggccccacgcctgttaatctacggtgcgagcagccgcgcgaccggcatcccggcgcgtttctctggcagcggctctggtaccgatttcacgttaaccatctctcgtttagaaccagaagatttcgcggtttactactgcgcggcgtgggacgactcttctctgtctggctatgtgttcggtcaaggcacgaaggtggagattaaa

SEQ ID NO: 382 - DNA, 771 bp, synthetic construct
  source 1..771: mol_type = other DNA
caggtgcagttagttgaaagcggcggtggtgtggtgcaaccgggtcgtagcttacgtttatcttgcgcggcctctggctttacctttagcagctatgcgatgcattgggtgcgtcaggcgccaggtaagggcttagagtgggtggcggttatctcttatgacggtagcaacaagtactacgccgatagcgttaaaggccgcttcacgattagccgcgacaacagcaaaaataccttatacttacagatgaattctttacgcgccgaggatacggccgtttattattgtgcccgtgacggttacttctaccgccgcaatgtgacgacgtattacagcagctatatggactactggggtcagtggggccagggcacgttagttacggttagctctggtggcagcagccgcagcagctctagcggcggcggtggcagcggtggcggcggcgaaattgtgctgacccaatctccggccacgctgagcctgtctccgggtgagcgcgcgacgttatcttgccgcgcgtctcagtctgtgagctcttcttatttagcgtggtaccaacagaaaccgggtcaggccccacgcctgttaatctacggtgcgagcagccgcgcgaccggcatcccggcgcgtttctctggcagcggctctggtaccgatttcacgttaaccatctctcgtttagaaccagaagatttcgcggtttactactgccagcaggccaaccgcttcccgttcacctttggccaaggtacgaaagttgagattaaa

SEQ ID NO: 383 - DNA, 771 bp, synthetic construct
  source 1..771: mol_type = other DNA
caggtgcagttagttgaaagcggcggtggtgtggtgcaaccgggtcgtagcttacgtttatcttgcgcggcctctggctttacctttagcagctatgcgatgcattgggtgcgtcaggcgccaggtaagggcttagagtgggtggcggttatctcttatgacggtagcaacaagtactacgccgatagcgttaaaggccgcttcacgattagccgcgacaacagcaaaaataccttatacttacagatgaattctttacgcgccgaggatacggccgtttattattgtgcccgtgacggttacttctaccgccgcaatgtgacgacgtattacagcagctatatggactactggggtcagtggggccagggcacgttagttacggttagctctggtggcagcagccgcagcagctctagcggcggcggtggcagcggtggcggcggcgaaattgtgctgacccaatctccggccacgctgagcctgtctccgggtgagcgcgcgacgttatcttgccgcgcgtctcagtctgtgagctcttcttatttagcgtggtaccaacagaaaccgggtcaggccccacgcctgttaatctacggtgcgagcagccgcgcgaccggcatcccggcgcgtttctctggcagcggctctggtaccgatttcacgttaaccatctctcgtttagaaccagaagatttcgcggtttactactgccagcagtctgacacgccaatgtatacgtttggccagggtacgaaggtggagatcaaa

SEQ ID NO: 384 - DNA, 774 bp, synthetic construct
  source 1..774: mol_type = other DNA
caggtgcagttagttgaaagcggcggtggtgtggtgcaaccgggtcgtagcttacgtttatcttgcgcggcctctggctttacctttagcagctatgcgatgcattgggtgcgtcaggcgccaggtaagggcttagagtgggtggcggttatctcttatgacggtagcaacaagtactacgccgatagcgttaaaggccgcttcacgattagccgcgacaacagcaaaaataccttatacttacagatgaattctttacgcgccgaggatacggccgtttattattgtgcccgtgacggttacttctaccgccgcaatgtgacgacgtattacagcagctatatggactactggggtcagtggggccagggcacgttagttacggttagctctggtggcagcagccgcagcagctctagcggcggcggtggcagcggtggcggcggcgaaattgtgctgacccaatctccggccacgctgagcctgtctccgggtgagcgcgcgacgttatcttgccgcgcgtctcagtctgtgagctcttcttatttagcgtggtaccaacagaaaccgggtcaggccccacgcctgttaatctacggtgcgagcagccgcgcgaccggcatcccggcgcgtttctctggcagcggctctggtaccgatttcacgttaaccatctctcgtttagaaccagaagatttcgcggtttactactgccagcagtcttactctccaccggcctatacctttggtcaaggtaccaaggttgaaatcaaa

SEQ ID NO: 385 - DNA, 771 bp, synthetic construct
  source 1..771: mol_type = other DNA
caggtgcagttagttgaaagcggcggtggtgtggtgcaaccgggtcgtagcttacgtttatcttgcgcggcctctggctttacctttagcagctatgcgatgcattgggtgcgtcaggcgccaggtaagggcttagagtgggtggcggttatctcttatgacggtagcaacaagtactacgccgatagcgttaaaggccgcttcacgattagccgcgacaacagcaaaaataccttatacttacagatgaattctttacgcgccgaggatacggccgtttattattgtgcccgtgacggttacttctaccgccgcaatgtgacgacgtattacagcagctatatggactactggggtcagtggggccagggcacgttagttacggttagctctggtggcagcagccgcagcagctctagcggcggcggtggcagcggtggcggcggcgaaattgtgctgacccaatctccggccacgctgagcctgtctccgggtgagcgcgcgacgttatcttgccgcgcgtctcagtctgtgagctcttcttatttagcgtggtaccaacagaaaccgggtcaggccccacgcctgttaatctacggtgcgagcagccgcgcgaccggcatcccggcgcgtttctctggcagcggctctggtaccgatttcacgttaaccatctctcgtttagaaccagaagatttcgcggtttactactgccagcagtcttactctccaccgccaacctttggccaaggtacgaaagttgagattaaa

SEQ ID NO: 386 - DNA, 771 bp, synthetic construct
  source 1..771: mol_type = other DNA
caggtgcagttagttgaaagcggcggtggtgtggtgcaaccgggtcgtagcttacgtttatcttgcgcggcctctggctttacctttagcagctatgcgatgcattgggtgcgtcaggcgccaggtaagggcttagagtgggtggcggttatctcttatgacggtagcaacaagtactacgccgatagcgttaaaggccgcttcacgattagccgcgacaacagcaaaaataccttatacttacagatgaattctttacgcgccgaggatacggccgtttattattgtgcccgtgacggttacttctaccgccgcaatgtgacgacgtattacagcagctatatggactactggggtcagtggggccagggcacgttagttacggttagctctggtggcagcagccgcagcagctctagcggcggcggtggcagcggtggcggcggcgaaattgtgctgacccaatctccggccacgctgagcctgtctccgggtgagcgcgcgacgttatcttgccgcgcgtctcagtctgtgagctcttcttatttagcgtggtaccaacagaaaccgggtcaggccccacgcctgttaatctacggtgcgagcagccgcgcgaccggcatcccggcgcgtttctctggcagcggctctggtaccgatttcacgttaaccatctctcgtttagaaccagaagatttcgcggtttactactgccagcagtactactcttacccgcaaacctttggccaaggtacgaaagttgagattaaa

SEQ ID NO: 387 - DNA, 777 bp, synthetic construct
  source 1..777: mol_type = other DNA
caggtgcagttagttgaaagcggcggtggtgtggtgcaaccgggtcgtagcttacgtttatcttgcgcggcctctggctttacctttagcagctatgcgatgcattgggtgcgtcaggcgccaggtaagggcttagagtgggtggcggttatctcttatgacggtagcaacaagtactacgccgatagcgttaaaggccgcttcacgattagccgcgacaacagcaaaaataccttatacttacagatgaattctttacgcgccgaggatacggccgtttattattgtgcccgtgacggttacttctaccgccgcaatgtgacgacgtattacagcagctatatggactactggggtcagtggggccagggcacgttagttacggttagctctggtggcagcagccgcagcagctctagcggcggcggtggcagcggtggcggcggcgaaattgtgctgacccaatctccggccacgctgagcctgtctccgggtgagcgcgcgacgttatcttgccgcgcgtctcagtctgtgagctcttcttatttagcgtggtaccaacagaaaccgggtcaggccccacgcctgttaatctacggtgcgagcagccgcgcgaccggcatcccggcgcgtttctctggcagcggctctggtaccgatttcacgttaaccatctctcgtttagaaccagaagatttcgcggtttactactgccagagctacgactcttctctgtctggctggctgtttggtcaaggtaccaaggttgaaatcaaa

SEQ ID NO: 388 - DNA, 771 bp, synthetic construct
  source 1..771: mol_type = other DNA
caggtgcagttagttgaaagcggcggtggtgtggtgcaaccgggtcgtagcttacgtttatcttgcgcggcctctggctttacctttagcagctatgcgatgcattgggtgcgtcaggcgccaggtaagggcttagagtgggtggcggttatctcttatgacggtagcaacaagtactacgccgatagcgttaaaggccgcttcacgattagccgcgacaacagcaaaaataccttatacttacagatgaattctttacgcgccgaggatacggccgtttattattgtgcccgtgacggttacttctaccgccgcaatgtgacgacgtattacagcagctatatggactactggggtcagtggggccagggcacgttagttacggttagctctggtggcagcagccgcagcagctctagcggcggcggtggcagcggtggcggcggcgaaattgtgctgacccaatctccggccacgctgagcctgtctccgggtgagcgcgcgacgttatcttgccgcgcgtctcagtctgtgagctcttcttatttagcgtggtaccaacagaaaccgggtcaggccccacgcctgttaatctacggtgcgagcagccgcgcgaccggcatcccggcgcgtttctctggcagcggctctggtaccgatttcacgttaaccatctctcgtttagaaccagaagatttcgcggtttactactgccagacctgggactctttcggtcaggtttttggccagggtacgaaggtggagatcaaa

SEQ ID NO: 389 - DNA, 780 bp, synthetic construct
  source 1..780: mol_type = other DNA
caggtgcagttagttgaaagcggcggtggtgtggtgcaaccgggtcgtagcttacgtttatcttgcgcggcctctggctttacctttagcagctatgcgatgcattgggtgcgtcaggcgccaggtaagggcttagagtgggtggcggttatctcttatgacggtagcaacaagtactacgccgatagcgttaaaggccgcttcacgattagccgcgacaacagcaaaaataccttatacttacagatgaattctttacgcgccgaggatacggccgtttattattgtgcccgtgacggttacttctaccgccgcaatgtgacgacgtattacagcagctatatggactactggggtcagtggggccagggcacgttagttacggttagctctggtggcagcagccgcagcagctctagcggcggcggtggcagcggtggcggcggcgaaattgtgctgacccaatctccggccacgctgagcctgtctccgggtgagcgcgcgacgttatcttgccgcgcgtctcagtctgtgagctcttcttatttagcgtggtaccaacagaaaccgggtcaggccccacgcctgttaatctacggtgcgagcagccgcgcgaccggcatcccggcgcgtttctctggcagcggctctggtaccgatttcacgttaaccatctctcgtttagaaccagaagatttcgcggtttactactgccaggtgtgggactctaactctagcccacgtgtggtgttcggtcaaggcacgaaggtggagattaaa

SEQ ID NO: 390 - DNA, 780 bp, synthetic construct
  source 1..780: mol_type = other DNA
caggtgcagttagttgaaagcggcggtggtgtggtgcaaccgggtcgtagcttacgtttatcttgcgcggcctctggctttacctttagcagctatgcgatgcattgggtgcgtcaggcgccaggtaagggcttagagtgggtggcggttatctcttatgacggtagcaacaagtactacgccgatagcgttaaaggccgcttcacgattagccgcgacaacagcaaaaataccttatacttacagatgaattctttacgcgccgaggatacggccgtttattattgtgcccgtgacggttacttctaccgccgcaatgtgacgacgtattacagcagctatatggactactggggtcagtggggccagggcacgttagttacggttagctctggtggcagcagccgcagcagctctagcggcggcggtggcagcggtggcggcggcgaaattgtgctgacccaatctccggccacgctgagcctgtctccgggtgagcgcgcgacgttatcttgccgcgcgtctcagtctgtgagctcttcttatttagcgtggtaccaacagaaaccgggtcaggccccacgcctgttaatctacggtgcgagcagccgcgcgaccggcatcccggcgcgtttctctggcagcggctctggtaccgatttcacgttaaccatctctcgtttagaaccagaagatttcgcggtttactactgccaggtgtgggactcttcttctgatttacagggcgtgttcggtcaaggcacgaaggtggagattaaa

SEQ ID NO: 391 - DNA, 774 bp, synthetic construct
  source 1..774: mol_type = other DNA
caggtgcagttagttgaaagcggcggtggtgtggtgcaaccgggtcgtagcttacgtttatcttgcgcggcctctggctttacctttagcagctatgcgatgcattgggtgcgtcaggcgccaggtaagggcttagagtgggtggcggttatctcttatgacggtagcaacaagtactacgccgatagcgttaaaggccgcttcacgattagccgcgacaacagcaaaaataccttatacttacagatgaattctttacgcgccgaggatacggccgtttattattgtgcccgtgacggttacttctaccgccgcaatgtgacgacgtattacagcagctatatggactactggggtcagtggggccagggcacgttagttacggttagctctggtggcagcagccgcagcagctctagcggcggcggtggcagcggtggcggcggcgaaattgtgctgacccaatctccggccacgctgagcctgtctccgggtgagcgcgcgacgttatcttgccgcgcgtctcagtctgtgagctcttcttatttagcgtggtaccaacagaaaccgggtcaggccccacgcctgttaatctacggtgcgagcagccgcgcgaccggcatcccggcgcgtttctctggcagcggctctggtaccgatttcacgttaaccatctctcgtttagaaccagaagatttcgcggtttactactgcagcagctacacgtcttctagcacgcgtggctttggtcaaggtaccaaggttgaaatcaaa

SEQ ID NO: 392 - DNA, 741 bp, synthetic construct
  source 1..741: mol_type = other DNA
caggtgcagttagttgaaagcggcggtggtgtggtgcaaccgggtcgtagcttacgtttatcttgcgcggcctctggctttacctttagcagctatgcgatgcattgggtgcgtcaggcgccaggtaagggcttagagtgggtggcggttatctcttatgacggtagcaacaagtactacgccgatagcgttaaaggccgcttcacgattagccgcgacaacagcaaaaataccttatacttacagatgaattctttacgcgccgaggatacggccgtttattattgtgcccgtgacatcggttctggtgccttcgatatttggggtcaatggggccaaggcaccctggttacggttagcagcggcggctcttctcgctcttctagctctggtggcggcggctctggcggcggtggcgaaattgttctgacccaaagcccggcgaccctgagcctgagcccaggtgaacgcgccaccctgagctgtcgtgcctctcaaagcgtttcttctagctacctggcctggtatcaacagaaaccaggtcaggccccgcgcttactgatttatggtgcgtcttctcgcgcgacgggtatcccagcgcgtttttctggcagcggctctggcaccgatttcacgctgaccatttctcgcctggaaccagaggactttgccgtttattactgccaacagagctacagcccaccaatcacctttggccaaggtacgaaggtggagattaaa

SEQ ID NO: 393 - DNA, 771 bp, synthetic construct
  source 1..771: mol_type = other DNA
caggtgcagttagttgaaagcggcggtggtgtggtgcaaccgggtcgtagcttacgtttatcttgcgcggcctctggctttacctttagcagctatgcgatgcattgggtgcgtcaggcgccaggtaagggcttagagtgggtggcggttatctcttatgacggtagcaacaagtactacgccgatagcgttaaaggccgcttcacgattagccgcgacaacagcaaaaataccttatacttacagatgaattctttacgcgccgaggatacggccgtttattattgtgcccgtgacaaggaggcctaccgctctagcaattcttactggtatggtatggatgtgtggggccaatggggtcaaggcaccctggtgacggtttcttctggtggctcttctcgtagcagctctagcggcggtggcggcagcggtggcggcggtgaaattgtgctgacccagagcccggccacgctgtctttaagcccgggcgagcgtgccacgttaagctgtcgcgccagccaaagcgttagctctagctatttagcctggtatcaacagaagccaggccaggcgccacgtttattaatctatggtgcctcttctcgtgcgaccggtattccggcgcgctttagcggctctggtagcggcaccgacttcaccctgacgatctctcgtttagagccggaggatttcgcggtgtactattgtggtacgtgggatagcagctctggtgccggtgtgttcggccagggcacgaaggttgaaatcaaa

SEQ ID NO: 394 - DNA, 741 bp, synthetic construct
  source 1..741: mol_type = other DNA
caggtgcagttagttgaaagcggcggtggtgtggtgcaaccgggtcgtagcttacgtttatcttgcgcggcctctggctttacctttagcagctatgcgatgcattgggtgcgtcaggcgccaggtaagggcttagagtgggtggcggttatctcttatgacggtagcaacaagtactacgccgatagcgttaaaggccgcttcacgattagccgcgacaacagcaaaaataccttatacttacagatgaattctttacgcgccgaggatacggccgtttattattgtgcccgtgacaagggtgccgacacgccatttgattactggggtcagtggggtcagggcaccttagttacggtgagcagcggcggttcttctcgctctagctcttctggcggcggcggtagcggcggtggcggcgaaatcgtgctgacgcagagcccggcgaccctgagcctgtctccaggcgagcgcgcgaccctgtcttgccgcgcctctcagtctgtttctagctcttatttagcgtggtaccagcagaagccaggccaagcgccacgcctgctgatttacggcgcctcttctcgtgccacgggtatcccggcgcgtttcagcggcagcggtagcggcaccgacttcaccctgaccatctctcgtctggagccagaggatttcgccgtgtactattgtctgcagtaccatgccttcgccagctttggccaaggtacgaaggtggagattaaa

SEQ ID NO: 395 - DNA, 744 bp, synthetic construct
  source 1..744: mol_type = other DNA
caggtgcagttagttgaaagcggcggtggtgtggtgcaaccgggtcgtagcttacgtttatcttgcgcggcctctggctttacctttagcagctatgcgatgcattgggtgcgtcaggcgccaggtaagggcttagagtgggtggcggttatctcttatgacggtagcaacaagtactacgccgatagcgttaaaggccgcttcacgattagccgcgacaacagcaaaaataccttatacttacagatgaattctttacgcgccgaggatacggccgtttattattgtgcccgtgacaagggtggtatggttccattcgattattggggtcaatggggccaaggcaccctggttacggttagcagcggcggctcttctcgctcttctagctctggtggcggcggctctggcggcggtggcgaaattgttctgacccaaagcccggcgaccctgagcctgagcccaggtgaacgcgccaccctgagctgtcgtgcctctcaaagcgtttcttctagctacctggcctggtatcaacagaaaccaggtcaggccccgcgcttactgatttatggtgcgtcttctcgcgcgacgggtatcccagcgcgtttttctggcagcggctctggcaccgatttcacgctgaccatttctcgcctggaaccagaggactttgccgtttattactgccaacagtatgacagcgttccattaacctttggccaaggtacgaaggtggagattaaa

SEQ ID NO: 396 - DNA, 744 bp, synthetic construct
  source 1..744: mol_type = other DNA
caggtgcagttagttgaaagcggcggtggtgtggtgcaaccgggtcgtagcttacgtttatcttgcgcggcctctggctttacctttagcagctatgcgatgcattgggtgcgtcaggcgccaggtaagggcttagagtgggtggcggttatctcttatgacggtagcaacaagtactacgccgatagcgttaaaggccgcttcacgattagccgcgacaacagcaaaaataccttatacttacagatgaattctttacgcgccgaggatacggccgtttattattgtgcccgtgacaagggtggtatgtacggtttcgattattggggtcaatggggccaaggcaccctggttacggttagcagcggcggctcttctcgctcttctagctctggtggcggcggctctggcggcggtggcgaaattgttctgacccaaagcccggcgaccctgagcctgagcccaggtgaacgcgccaccctgagctgtcgtgcctctcaaagcgtttcttctagctacctggcctggtatcaacagaaaccaggtcaggccccgcgcttactgatttatggtgcgtcttctcgcgcgacgggtatcccagcgcgtttttctggcagcggctctggcaccgatttcacgctgaccatttctcgcctggaaccagaggactttgccgtttattactgccaacagtatgacagcttaccattaacctttggccaaggtacgaaggtggagattaaa

SEQ ID NO: 397 - DNA, 777 bp, synthetic construct
  source 1..777: mol_type = other DNA
caggtgcagttagttgaaagcggcggtggtgtggtgcaaccgggtcgtagcttacgtttatcttgcgcggcctctggctttacctttagcagctatgcgatgcattgggtgcgtcaggcgccaggtaagggcttagagtgggtggcggttatctcttatgacggtagcaacaagtactacgccgatagcgttaaaggccgcttcacgattagccgcgacaacagcaaaaataccttatacttacagatgaattctttacgcgccgaggatacggccgtttattattgtgcccgtgacaagtctggttaccgctctggccatatcggtatttacggcggcctgggtatggacgtttggggccagtggggccagggtacgttagttacggtgtcttctggcggcagctctcgtagctctagcagcggcggtggcggctctggcggcggcggcgaaattgtgctgacgcaaagcccagccaccctgagcttaagcccaggtgagcgtgccacgttaagctgtcgtgccagccaaagcgtgtcttctagctacctggcctggtaccagcagaaaccaggccaagccccacgtttattaatctacggcgcgagctctcgtgcgaccggtattccggcgcgcttcagcggcagcggttctggcaccgacttcacgctgacgatcagccgcctggagccggaagactttgccgtttactattgccaggtttgggactcttctagcttctgggtgtttggccaaggtacgaaagttgagattaaa

SEQ ID NO: 398 - DNA, 768 bp, synthetic construct
  source 1..768: mol_type = other DNA
caggtgcagttagttgaaagcggcggtggtgtggtgcaaccgggtcgtagcttacgtttatcttgcgcggcctctggctttacctttagcagctatgcgatgcattgggtgcgtcaggcgccaggtaagggcttagagtgggtggcggttatctcttatgacggtagcaacaagtactacgccgatagcgttaaaggccgcttcacgattagccgcgacaacagcaaaaataccttatacttacagatgaattctttacgcgccgaggatacggccgtttattattgtgcccgtgacttattcgcctaccgccacgtgggctacggttgcttcgattattggggccaatggggtcaaggcaccctggtgacggtttcttctggtggctcttctcgtagcagctctagcggcggtggcggcagcggtggcggcggtgaaattgtgctgacccagagcccggccacgctgtctttaagcccgggcgagcgtgccacgttaagctgtcgcgccagccaaagcgttagctctagctatttagcctggtatcaacagaagccaggccaggcgccacgtttattaatctatggtgcctcttctcgtgcgaccggtattccggcgcgctttagcggctctggtagcggcaccgacttcaccctgacgatctctcgtttagagccggaggatttcgcggtgtactattgtggtacgtgggatagccgtttattatctggtggcatgttcggccagggcacgaaggttgaaatcaaa

SEQ ID NO: 399 - DNA, 771 bp, synthetic construct
  source 1..771: mol_type = other DNA
caggtgcagttagttgaaagcggcggtggtgtggtgcaaccgggtcgtagcttacgtttatcttgcgcggcctctggctttacctttagcagctatgcgatgcattgggtgcgtcaggcgccaggtaagggcttagagtgggtggcggttatctcttatgacggtagcaacaagtactacgccgatagcgttaaaggccgcttcacgattagccgcgacaacagcaaaaataccttatacttacagatgaattctttacgcgccgaggatacggccgtttattattgtgcccgtgacttaggtaactaccgctctaaacaggtttactttaacgcgtttgatatctggggtcaatggggccagggcaccttagttacggtttctagcggtggtagcagccgttctagcagctctggcggcggcggtagcggcggtggcggcgaaattgtgctgacccagtctccagcgacgttaagcctgagcccaggcgagcgcgccaccttatcttgtcgtgccagccaaagcgttagcagctcttacctggcctggtatcaacaaaaaccgggccaagcgccacgcttactgatctacggtgccagcagccgtgccaccggcattccagcgcgtttttctggtagcggcagcggtacggattttacgttaacgatttctcgcctggagccggaggattttgccgtgtactactgtcaggcgtgggattctcgctctgccaatgttgcgtttggccaaggtacgaaagttgagattaaa

SEQ ID NO: 400 - DNA, 753 bp, synthetic construct
  source 1..753: mol_type = other DNA
caggtgcagttagttgaaagcggcggtggtgtggtgcaaccgggtcgtagcttacgtttatcttgcgcggcctctggctttacctttagcagctatgcgatgcattgggtgcgtcaggcgccaggtaagggcttagagtgggtggcggttatctcttatgacggtagcaacaagtactacgccgatagcgttaaaggccgcttcacgattagccgcgacaacagcaaaaataccttatacttacagatgaattctttacgcgccgaggatacggccgtttattattgtgcccgtgacttacgcggtgcctggggtccaggcggcttcgacgtgtggggtcagtggggccagggtacgttagtgaccgtgagctctggtggttcttctcgttcttctagcagcggcggtggcggctctggcggcggcggtgaaattgttctgacccagagcccggcgaccctgtctttaagcccaggtgaacgtgcgacgctgtcttgtcgcgcgtctcaatctgtgtctagctcttatttagcgtggtatcaacaaaaaccaggccaagccccgcgtctgttaatttacggtgccagctctcgcgccacgggcattccggcccgttttagcggtagcggcagcggtacggattttaccttaacgattagccgcttagagccggaggactttgccgtgtactattgccaacagtactactacaccccgctgacgttcggtcaaggcacgaaagtggaaatcaaa

SEQ ID NO: 401 - DNA, 750 bp, synthetic construct
  source 1..750: mol_type = other DNA
caggtgcagttagttgaaagcggcggtggtgtggtgcaaccgggtcgtagcttacgtttatcttgcgcggcctctggctttacctttagcagctatgcgatgcattgggtgcgtcaggcgccaggtaagggcttagagtgggtggcggttatctcttatgacggtagcaacaagtactacgccgatagcgttaaaggccgcttcacgattagccgcgacaacagcaaaaataccttatacttacagatgaattctttacgcgccgaggatacggccgtttattattgtgcccgtgacttacgcggtatcgccgttgcggcgaactggggtcagtggggtcagggcaccttagttacggtgagcagcggcggttcttctcgctctagctcttctggcggcggcggtagcggcggtggcggcgaaatcgtgctgacgcagagcccggcgaccctgagcctgtctccaggcgagcgcgcgaccctgtcttgccgcgcctctcagtctgtttctagctcttatttagcgtggtaccagcagaagccaggccaagcgccacgcctgctgatttacggcgcctcttctcgtgccacgggtatcccggcgcgtttcagcggcagcggtagcggcaccgacttcaccctgaccatctctcgtctggagccagaggatttcgccgtgtactattgtcagagctacgatatctctttaagcgcgctggttttcggtcaaggcacgaaagtggaaatcaaa

SEQ ID NO: 402 - DNA, 774 bp, synthetic construct
  source 1..774: mol_type = other DNA
caggtgcagttagttgaaagcggcggtggtgtggtgcaaccgggtcgtagcttacgtttatcttgcgcggcctctggctttacctttagcagctatgcgatgcattgggtgcgtcaggcgccaggtaagggcttagagtgggtggcggttatctcttatgacggtagcaacaagtactacgccgatagcgttaaaggccgcttcacgattagccgcgacaacagcaaaaataccttatacttacagatgaattctttacgcgccgaggatacggccgtttattattgtgcccgtgacttacgcggttaccgcggtggcggcacgtacgatgcctttgatgtgtggggtcaatggggtcagggcaccctggttacggtttcttctggcggttctagccgtagctctagcagcggtggcggcggctctggcggcggtggcgaaattgtgctgacccagagcccagccaccttatctctgagcccgggtgaacgcgccacgctgtcttgtcgcgcgtctcagtctgtgtctagcagctacttagcgtggtaccagcaaaagccgggccaggccccgcgcttattaatttacggtgcctctagccgtgcgacgggcattccggcccgttttagcggttctggcagcggcacggactttaccttaacgatcagccgcttagaaccagaagactttgcggtttattactgtggtacctgggatagctctttattacgcgcgtcttgggtgtttggccaaggtacgaaagttgagattaaa

SEQ ID NO: 403 - DNA, 768 bp, synthetic construct
  source 1..768: mol_type = other DNA
caggtgcagttagttgaaagcggcggtggtgtggtgcaaccgggtcgtagcttacgtttatcttgcgcggcctctggctttacctttagcagctatgcgatgcattgggtgcgtcaggcgccaggtaagggcttagagtgggtggcggttatctcttatgacggtagcaacaagtactacgccgatagcgttaaaggccgcttcacgattagccgcgacaacagcaaaaataccttatacttacagatgaattctttacgcgccgaggatacggccgtttattattgtgcccgtgacttacgcggttaccgcggtggcggcacgtacgatgcctttgatgtgtggggtcaatggggtcagggcaccctggttacggtttcttctggcggttctagccgtagctctagcagcggtggcggcggctctggcggcggtggcgaaattgtgctgacccagagcccagccaccttatctctgagcccgggtgaacgcgccacgctgtcttgtcgcgcgtctcagtctgtgtctagcagctacttagcgtggtaccagcaaaagccgggccaggccccgcgcttattaatttacggtgcctctagccgtgcgacgggcattccggcccgttttagcggttctggcagcggcacggactttaccttaacgatcagccgcttagaaccagaagactttgcggtttattactgtggtacctgggatagctctacgacggccggcgtttttggccagggtacgaaggtggagatcaaa

SEQ ID NO: 404 - DNA, 765 bp, synthetic construct
  source 1..765: mol_type = other DNA
caggtgcagttagttgaaagcggcggtggtgtggtgcaaccgggtcgtagcttacgtttatcttgcgcggcctctggctttacctttagcagctatgcgatgcattgggtgcgtcaggcgccaggtaagggcttagagtgggtggcggttatctcttatgacggtagcaacaagtactacgccgatagcgttaaaggccgcttcacgattagccgcgacaacagcaaaaataccttatacttacagatgaattctttacgcgccgaggatacggccgtttattattgtgcccgtgacttaacgggttaccgctctcgtagctaccaatgggatggtatggatgtgtggggccaatggggtcaaggcaccctggtgacggtttcttctggtggctcttctcgtagcagctctagcggcggtggcggcagcggtggcggcggtgaaattgtgctgacccagagcccggccacgctgtctttaagcccgggcgagcgtgccacgttaagctgtcgcgccagccaaagcgttagctctagctatttagcctggtatcaacagaagccaggccaggcgccacgtttattaatctatggtgcctcttctcgtgcgaccggtattccggcgcgctttagcggctctggtagcggcaccgacttcaccctgacgatctctcgtttagagccggaggatttcgcggtgtactattgtatgcaagccctgaccccgacgatctctttcggccaaggcaccaaagttgagatcaaa

SEQ ID NO: 405 - DNA, 771 bp, synthetic construct
  source 1..771: mol_type = other DNA
caggtgcagttagttgaaagcggcggtggtgtggtgcaaccgggtcgtagcttacgtttatcttgcgcggcctctggctttacctttagcagctatgcgatgcattgggtgcgtcaggcgccaggtaagggcttagagtgggtggcggttatctcttatgacggtagcaacaagtactacgccgatagcgttaaaggccgcttcacgattagccgcgacaacagcaaaaataccttatacttacagatgaattctttacgcgccgaggatacggccgtttattattgtgcccgtgacttaacgggttaccgctctcgtagctaccaatgggatggtatggatgtgtggggccaatggggtcaaggcaccctggtgacggtttcttctggtggctcttctcgtagcagctctagcggcggtggcggcagcggtggcggcggtgaaattgtgctgacccagagcccggccacgctgtctttaagcccgggcgagcgtgccacgttaagctgtcgcgccagccaaagcgttagctctagctatttagcctggtatcaacagaagccaggccaggcgccacgtttattaatctatggtgcctcttctcgtgcgaccggtattccggcgcgctttagcggctctggtagcggcaccgacttcaccctgacgatctctcgtttagagccggaggatttcgcggtgtactattgtcaatcttatgatagctctttatctgcctatgtttttggccagggtacgaaggtggagatcaaa

SEQ ID NO: 406 - DNA, 771 bp, synthetic construct
  source 1..771: mol_type = other DNA
caggtgcagttagttgaaagcggcggtggtgtggtgcaaccgggtcgtagcttacgtttatcttgcgcggcctctggctttacctttagcagctatgcgatgcattgggtgcgtcaggcgccaggtaagggcttagagtgggtggcggttatctcttatgacggtagcaacaagtactacgccgatagcgttaaaggccgcttcacgattagccgcgacaacagcaaaaataccttatacttacagatgaattctttacgcgccgaggatacggccgtttattattgtgcccgtgacttaacgggttaccgctctcgtagctaccaatgggatggtatggatgtgtggggccaatggggtcaaggcaccctggtgacggtttcttctggtggctcttctcgtagcagctctagcggcggtggcggcagcggtggcggcggtgaaattgtgctgacccagagcccggccacgctgtctttaagcccgggcgagcgtgccacgttaagctgtcgcgccagccaaagcgttagctctagctatttagcctggtatcaacagaagccaggccaggcgccacgtttattaatctatggtgcctcttctcgtgcgaccggtattccggcgcgctttagcggctctggtagcggcaccgacttcaccctgacgatctctcgtttagagccggaggatttcgcggtgtactattgtcaatcttatgatagctctttatctggttatgtttttggccagggtacgaaggtggagatcaaa

SEQ ID NO: 407 - DNA, 744 bp, synthetic construct
  source 1..744: mol_type = other DNA
caggtgcagttagttgaaagcggcggtggtgtggtgcaaccgggtcgtagcttacgtttatcttgcgcggcctctggctttacctttagcagctatgcgatgcattgggtgcgtcaggcgccaggtaagggcttagagtgggtggcggttatctcttatgacggtagcaacaagtactacgccgatagcgttaaaggccgcttcacgattagccgcgacaacagcaaaaataccttatacttacagatgaattctttacgcgccgaggatacggccgtttattattgtgcccgtgacaacggtgccggtgccttcggcgtgtggggtcaatggggccaaggcaccctggttacggttagcagcggcggctcttctcgctcttctagctctggtggcggcggctctggcggcggtggcgaaattgttctgacccaaagcccggcgaccctgagcctgagcccaggtgaacgcgccaccctgagctgtcgtgcctctcaaagcgtttcttctagctacctggcctggtatcaacagaaaccaggtcaggccccgcgcttactgatttatggtgcgtcttctcgcgcgacgggtatcccagcgcgtttttctggcagcggctctggcaccgatttcacgctgaccatttctcgcctggaaccagaggactttgccgtttattactgccaacagctgaacagcaacccaccatggacctttggccaaggtacgaaggtggagattaaa

SEQ ID NO: 408 - DNA, 765 bp, synthetic construct
  source 1..765: mol_type = other DNA
caggtgcagttagttgaaagcggcggtggtgtggtgcaaccgggtcgtagcttacgtttatcttgcgcggcctctggctttacctttagcagctatgcgatgcattgggtgcgtcaggcgccaggtaagggcttagagtgggtggcggttatctcttatgacggtagcaacaagtactacgccgatagcgttaaaggccgcttcacgattagccgcgacaacagcaaaaataccttatacttacagatgaattctttacgcgccgaggatacggccgtttattattgtgcccgtgacaacttaggttaccgcggtacccattctggttatgccatggatagctggggccaatggggtcaaggcaccctggtgacggtttcttctggtggctcttctcgtagcagctctagcggcggtggcggcagcggtggcggcggtgaaattgtgctgacccagagcccggccacgctgtctttaagcccgggcgagcgtgccacgttaagctgtcgcgccagccaaagcgttagctctagctatttagcctggtatcaacagaagccaggccaggcgccacgtttattaatctatggtgcctcttctcgtgcgaccggtattccggcgcgctttagcggctctggtagcggcaccgacttcaccctgacgatctctcgtttagagccggaggatttcgcggtgtactattgtcaagtttgggatagcagcacgtctgttgtttttggtcagggcaccaaggttgagattaaa

SEQ ID NO: 409 - DNA, 741 bp, synthetic construct
  source 1..741: mol_type = other DNA
caggtgcagttagttgaaagcggcggtggtgtggtgcaaccgggtcgtagcttacgtttatcttgcgcggcctctggctttacctttagcagctatgcgatgcattgggtgcgtcaggcgccaggtaagggcttagagtgggtggcggttatctcttatgacggtagcaacaagtactacgccgatagcgttaaaggccgcttcacgattagccgcgacaacagcaaaaataccttatacttacagatgaattctttacgcgccgaggatacggccgtttattattgtgcccgtgacaaccaatacggtgccgacgattattggggtcaatggggccaaggcaccctggttacggttagcagcggcggctcttctcgctcttctagctctggtggcggcggctctggcggcggtggcgaaattgttctgacccaaagcccggcgaccctgagcctgagcccaggtgaacgcgccaccctgagctgtcgtgcctctcaaagcgtttcttctagctacctggcctggtatcaacagaaaccaggtcaggccccgcgcttactgatttatggtgcgtcttctcgcgcgacgggtatcccagcgcgtttttctggcagcggctctggcaccgatttcacgctgaccatttctcgcctggaaccagaggactttgccgtttattactgccaacagacctacaccttaccaatcacctttggccaaggtacgaaggtggagattaaa

SEQ ID NO: 410 - DNA, 744 bp, synthetic construct
  source 1..744: mol_type = other DNA
caggtgcagttagttgaaagcggcggtggtgtggtgcaaccgggtcgtagcttacgtttatcttgcgcggcctctggctttacctttagcagctatgcgatgcattgggtgcgtcaggcgccaggtaagggcttagagtgggtggcggttatctcttatgacggtagcaacaagtactacgccgatagcgttaaaggccgcttcacgattagccgcgacaacagcaaaaataccttatacttacagatgaattctttacgcgccgaggatacggccgtttattattgtgcccgtgacccagccttatactctggtatggattattggggtcaatggggccaaggcaccctggttacggttagcagcggcggctcttctcgctcttctagctctggtggcggcggctctggcggcggtggcgaaattgttctgacccaaagcccggcgaccctgagcctgagcccaggtgaacgcgccaccctgagctgtcgtgcctctcaaagcgtttcttctagctacctggcctggtatcaacagaaaccaggtcaggccccgcgcttactgatttatggtgcgtcttctcgcgcgacgggtatcccagcgcgtttttctggcagcggctctggcaccgatttcacgctgaccatttctcgcctggaaccagaggactttgccgtttattactgcgagacctggggccgcgatacgcgcgtttttggccagggtacgaaggttgaaatcaaa

SEQ ID NO: 411 - DNA, 759 bp, synthetic construct
  source 1..759: mol_type = other DNA
caggtgcagttagttgaaagcggcggtggtgtggtgcaaccgggtcgtagcttacgtttatcttgcgcggcctctggctttacctttagcagctatgcgatgcattgggtgcgtcaggcgccaggtaagggcttagagtgggtggcggttatctcttatgacggtagcaacaagtactacgccgatagcgttaaaggccgcttcacgattagccgcgacaacagcaaaaataccttatacttacagatgaattctttacgcgccgaggatacggccgtttattattgtgcccgtgacccagactcttaccgctctagcggcacgtactatttcgatgtgtggggccaatggggtcaaggcaccctggtgacggtttcttctggtggctcttctcgtagcagctctagcggcggtggcggcagcggtggcggcggtgaaattgtgctgacccagagcccggccacgctgtctttaagcccgggcgagcgtgccacgttaagctgtcgcgccagccaaagcgttagctctagctatttagcctggtatcaacagaagccaggccaggcgccacgtttattaatctatggtgcctcttctcgtgcgaccggtattccggcgcgctttagcggctctggtagcggcaccgacttcaccctgacgatctctcgtttagagccggaggatttcgcggtgtactattgtcaacaatatgatagcccaccatggacgttcggccaaggcaccaaagttgagatcaaa

SEQ ID NO: 412 - DNA, 738 bp, synthetic construct
  source 1..738: mol_type = other DNA
caggtgcagttagttgaaagcggcggtggtgtggtgcaaccgggtcgtagcttacgtttatcttgcgcggcctctggctttacctttagcagctatgcgatgcattgggtgcgtcaggcgccaggtaagggcttagagtgggtggcggttatctcttatgacggtagcaacaagtactacgccgatagcgttaaaggccgcttcacgattagccgcgacaacagcaaaaataccttatacttacagatgaattctttacgcgccgaggatacggccgtttattattgtgcccgtgacccacacggtgttatggactactggggccagtggggtcaaggcacgctggtgaccgtttcttctggcggcagcagccgctcttcttcttctggcggtggtggcagcggcggtggcggcgagattgtgctgacgcagagcccagcgaccctgagcctgagcccgggcgagcgcgcgacgttaagctgccgtgccagccaatctgttagctcttcttacctggcctggtatcaacagaagccgggccaagccccgcgcctgttaatctatggcgcgtctagccgcgccacgggcatcccagcccgctttagcggctctggcagcggcacggattttaccttaacgattagccgtttagagccggaagacttcgccgtgtactactgccaaacctggggtaccggcgaggtggttttcggtcagggcaccaaggttgagatcaaa

SEQ ID NO: 413 - DNA, 741 bp, synthetic construct
  source 1..741: mol_type = other DNA
caggtgcagttagttgaaagcggcggtggtgtggtgcaaccgggtcgtagcttacgtttatcttgcgcggcctctggctttacctttagcagctatgcgatgcattgggtgcgtcaggcgccaggtaagggcttagagtgggtggcggttatctcttatgacggtagcaacaagtactacgccgatagcgttaaaggccgcttcacgattagccgcgacaacagcaaaaataccttatacttacagatgaattctttacgcgccgaggatacggccgtttattattgtgcccgtgacccattaggttacttagacgtgtggggccaatggggtcagggtaccctggtgacggtttctagcggcggcagctctcgctcttcttctagcggtggtggcggcagcggtggcggcggtgaaattgtgttaacccagtctccggcgaccctgagcctgagcccgggtgagcgtgccacgctgagctgccgcgcgtctcaatctgtgtcttcttcttatttagcgtggtaccagcaaaaaccgggtcaagcgccacgtttattaatttatggcgccagctctcgcgccaccggtatcccagcccgttttagcggtagcggcagcggtaccgattttacgttaaccattagccgcttagaaccggaggacttcgcggtttactattgtcagacgtggggcaccggtattcacggtgtttttggccagggtacgaaggttgaaatcaaa

SEQ ID NO: 414 - DNA, 759 bp, synthetic construct
  source 1..759: mol_type = other DNA
caggtgcagttagttgaaagcggcggtggtgtggtgcaaccgggtcgtagcttacgtttatcttgcgcggcctctggctttacctttagcagctatgcgatgcattgggtgcgtcaggcgccaggtaagggcttagagtgggtggcggttatctcttatgacggtagcaacaagtactacgccgatagcgttaaaggccgcttcacgattagccgcgacaacagcaaaaataccttatacttacagatgaattctttacgcgccgaggatacggccgtttattattgtgcccgtgacccaatggccacgcgctactactattatggtatggacgtgtggggtcagtggggccagggtacgttagtgaccgtgagctctggtggttcttctcgttcttctagcagcggcggtggcggctctggcggcggcggtgaaattgttctgacccagagcccggcgaccctgtctttaagcccaggtgaacgtgcgacgctgtcttgtcgcgcgtctcaatctgtgtctagctcttatttagcgtggtatcaacaaaaaccaggccaagccccgcgtctgttaatttacggtgccagctctcgcgccacgggcattccggcccgttttagcggtagcggcagcggtacggattttaccttaacgattagccgcttagagccggaggactttgccgtgtactattgccaagcgtgggactcttctggcctgggcgttttcggtcaaggcacgaaagtggaaatcaaa

SEQ ID NO: 415 - DNA, 738 bp, synthetic construct
  source 1..738: mol_type = other DNA
caggtgcagttagttgaaagcggcggtggtgtggtgcaaccgggtcgtagcttacgtttatcttgcgcggcctctggctttacctttagcagctatgcgatgcattgggtgcgtcaggcgccaggtaagggcttagagtgggtggcggttatctcttatgacggtagcaacaagtactacgccgatagcgttaaaggccgcttcacgattagccgcgacaacagcaaaaataccttatacttacagatgaattctttacgcgccgaggatacggccgtttattattgtgcccgtgacccatctggttctttagactattggggccaatggggtcagggtaccctggtgacggtttctagcggcggcagctctcgctcttcttctagcggtggtggcggcagcggtggcggcggtgaaattgtgttaacccagtctccggcgaccctgagcctgagcccgggtgagcgtgccacgctgagctgccgcgcgtctcaatctgtgtcttcttcttatttagcgtggtaccagcaaaaaccgggtcaagcgccacgtttattaatttatggcgccagctctcgcgccaccggtatcccagcccgttttagcggtagcggcagcggtaccgattttacgttaaccattagccgcttagaaccggaggacttcgcggtttactattgtcagacgtggggcaccggtaccgttgttttcggccagggcacgaaggttgagattaaa

SEQ ID NO: 416 - DNA, 747 bp, synthetic construct
  source 1..747: mol_type = other DNA
caggtgcagttagttgaaagcggcggtggtgtggtgcaaccgggtcgtagcttacgtttatcttgcgcggcctctggctttacctttagcagctatgcgatgcattgggtgcgtcaggcgccaggtaagggcttagagtgggtggcggttatctcttatgacggtagcaacaagtactacgccgatagcgttaaaggccgcttcacgattagccgcgacaacagcaaaaataccttatacttacagatgaattctttacgcgccgaggatacggccgtttattattgtgcccgtgacccatctggttctttagactattggggccaatggggtcagggtaccctggtgacggtttctagcggcggcagctctcgctcttcttctagcggtggtggcggcagcggtggcggcggtgaaattgtgttaacccagtctccggcgaccctgagcctgagcccgggtgagcgtgccacgctgagctgccgcgcgtctcaatctgtgtcttcttcttatttagcgtggtaccagcaaaaaccgggtcaagcgccacgtttattaatttatggcgccagctctcgcgccaccggtatcccagcccgttttagcggtagcggcagcggtaccgattttacgttaaccattagccgcttagaaccggaggacttcgcggtttactattgtcaggtttgggattattctagcgacttacacgtggtgtttggtcaaggtacgaaagttgaaattaaa

SEQ ID NO: 417 - DNA, 747 bp, synthetic construct
  source 1..747: mol_type = other DNA
caggtgcagttagttgaaagcggcggtggtgtggtgcaaccgggtcgtagcttacgtttatcttgcgcggcctctggctttacctttagcagctatgcgatgcattgggtgcgtcaggcgccaggtaagggcttagagtgggtggcggttatctcttatgacggtagcaacaagtactacgccgatagcgttaaaggccgcttcacgattagccgcgacaacagcaaaaataccttatacttacagatgaattctttacgcgccgaggatacggccgtttattattgtgcccgtgacccatctggttcttctggtctggattactggggtcagtggggtcagggcaccttagttacggtgagcagcggcggttcttctcgctctagctcttctggcggcggcggtagcggcggtggcggcgaaatcgtgctgacgcagagcccggcgaccctgagcctgtctccaggcgagcgcgcgaccctgtcttgccgcgcctctcagtctgtttctagctcttatttagcgtggtaccagcagaagccaggccaagcgccacgcctgctgatttacggcgcctcttctcgtgccacgggtatcccggcgcgtttcagcggcagcggtagcggcaccgacttcaccctgaccatctctcgtctggagccagaggatttcgccgtgtactattgtcaggcgtgggacagctctgcccacgtggtgtttggtcaaggtacgaaagttgaaattaaa

SEQ ID NO: 418 - DNA, 756 bp, synthetic construct
  source 1..756: mol_type = other DNA
caggtgcagttagttgaaagcggcggtggtgtggtgcaaccgggtcgtagcttacgtttatcttgcgcggcctctggctttacctttagcagctatgcgatgcattgggtgcgtcaggcgccaggtaagggcttagagtgggtggcggttatctcttatgacggtagcaacaagtactacgccgatagcgttaaaggccgcttcacgattagccgcgacaacagcaaaaataccttatacttacagatgaattctttacgcgccgaggatacggccgtttattattgtgcccgtgacccatctggttcttctggtctggattactggggtcagtggggtcagggcaccttagttacggtgagcagcggcggttcttctcgctctagctcttctggcggcggcggtagcggcggtggcggcgaaatcgtgctgacgcagagcccggcgaccctgagcctgtctccaggcgagcgcgcgaccctgtcttgccgcgcctctcagtctgtttctagctcttatttagcgtggtaccagcagaagccaggccaagcgccacgcctgctgatttacggcgcctcttctcgtgccacgggtatcccggcgcgtttcagcggcagcggtagcggcaccgacttcaccctgaccatctctcgtctggagccagaggatttcgccgtgtactattgtcagagctacgattcttctttaagcggcccgaactgggttttcggtcagggtaccaaagtggagatcaaa

SEQ ID NO: 419 - DNA, 780 bp, synthetic construct
  source 1..780: mol_type = other DNA
caggtgcagttagttgaaagcggcggtggtgtggtgcaaccgggtcgtagcttacgtttatcttgcgcggcctctggctttacctttagcagctatgcgatgcattgggtgcgtcaggcgccaggtaagggcttagagtgggtggcggttatctcttatgacggtagcaacaagtactacgccgatagcgttaaaggccgcttcacgattagccgcgacaacagcaaaaataccttatacttacagatgaattctttacgcgccgaggatacggccgtttattattgtgcccgtgacccaacgggttaccgcttaagcagcttatactattacgcgggctttgcctacggtatggatctgtggggccagtggggtcaaggtacgttagtgacggttagcagcggcggtagcagccgcagcagcagctctggcggcggtggcagcggcggcggcggcgaaattgttttaacccaatctccggcgaccttaagcttatctccaggcgagcgcgccaccttaagctgtcgtgccagccagtctgttagctctagctacttagcgtggtatcagcaaaaaccaggtcaagcgccacgcttattaatttatggcgccagcagccgtgccaccggcattccagcccgttttagcggttctggcagcggtacggactttacgttaaccatcagccgcctggaaccagaagacttcgccgtgtattattgtcaagcctgggacagctctacctatgtgttcggtcaaggcacgaaggtggagattaaa

SEQ ID NO: 420 - DNA, 780 bp, synthetic construct
  source 1..780: mol_type = other DNA
caggtgcagttagttgaaagcggcggtggtgtggtgcaaccgggtcgtagcttacgtttatcttgcgcggcctctggctttacctttagcagctatgcgatgcattgggtgcgtcaggcgccaggtaagggcttagagtgggtggcggttatctcttatgacggtagcaacaagtactacgccgatagcgttaaaggccgcttcacgattagccgcgacaacagcaaaaataccttatacttacagatgaattctttacgcgccgaggatacggccgtttattattgtgcccgtgacccaacgggttaccgcttaagcagcttatactattacgcgggctttgcctacggtatggatgtgtggggccagtggggtcaaggtacgttagtgacggttagcagcggcggtagcagccgcagcagcagctctggcggcggtggcagcggcggcggcggcgaaattgttttaacccaatctccggcgaccttaagcttatctccaggcgagcgcgccaccttaagctgtcgtgccagccagtctgttagctctagctacttagcgtggtatcagcaaaaaccaggtcaagcgccacgcttattaatttatggcgccagcagccgtgccaccggcattccagcccgttttagcggttctggcagcggtacggactttacgttaaccatcagccgcctggaaccagaagacttcgccgtgtattattgtatgcaagagacgcattggccacatacctttggtcaaggtaccaaggttgaaatcaaa

SEQ ID NO: 421 - DNA, 741 bp, synthetic construct
  source 1..741: mol_type = other DNA
caggtgcagttagttgaaagcggcggtggtgtggtgcaaccgggtcgtagcttacgtttatcttgcgcggcctctggctttacctttagcagctatgcgatgcattgggtgcgtcaggcgccaggtaagggcttagagtgggtggcggttatctcttatgacggtagcaacaagtactacgccgatagcgttaaaggccgcttcacgattagccgcgacaacagcaaaaataccttatacttacagatgaattctttacgcgccgaggatacggccgtttattattgtgcccgtgacccaacgcgccgcttcgacctgtggggccaatggggtcagggtaccctggtgacggtttctagcggcggcagctctcgctcttcttctagcggtggtggcggcagcggtggcggcggtgaaattgtgttaacccagtctccggcgaccctgagcctgagcccgggtgagcgtgccacgctgagctgccgcgcgtctcaatctgtgtcttcttcttatttagcgtggtaccagcaaaaaccgggtcaagcgccacgtttattaatttatggcgccagctctcgcgccaccggtatcccagcccgttttagcggtagcggcagcggtaccgattttacgttaaccattagccgcttagaaccggaggacttcgcggtttactattgtcaggcctgggatagcacgccgggtgttgtttttggccagggtacgaaggttgaaatcaaa

SEQ ID NO: 422 - DNA, 744 bp, synthetic construct
  source 1..744: mol_type = other DNA
caggtgcagttagttgaaagcggcggtggtgtggtgcaaccgggtcgtagcttacgtttatcttgcgcggcctctggctttacctttagcagctatgcgatgcattgggtgcgtcaggcgccaggtaagggcttagagtgggtggcggttatctcttatgacggtagcaacaagtactacgccgatagcgttaaaggccgcttcacgattagccgcgacaacagcaaaaataccttatacttacagatgaattctttacgcgccgaggatacggccgtttattattgtgcccgtgaccaacgcggttacggtatggacgtgtggggccaatggggtcagggtaccctggtgacggtttctagcggcggcagctctcgctcttcttctagcggtggtggcggcagcggtggcggcggtgaaattgtgttaacccagtctccggcgaccctgagcctgagcccgggtgagcgtgccacgctgagctgccgcgcgtctcaatctgtgtcttcttcttatttagcgtggtaccagcaaaaaccgggtcaagcgccacgtttattaatttatggcgccagctctcgcgccaccggtatcccagcccgttttagcggtagcggcagcggtaccgattttacgttaaccattagccgcttagaaccggaggacttcgcggtttactattgtcaggcctgggatagctctccgtctgttgtttttggccagggtacgaaggttgaaatcaaa

SEQ ID NO: 423 - DNA, 765 bp, synthetic construct
  source 1..765: mol_type = other DNA
caggtgcagttagttgaaagcggcggtggtgtggtgcaaccgggtcgtagcttacgtttatcttgcgcggcctctggctttacctttagcagctatgcgatgcattgggtgcgtcaggcgccaggtaagggcttagagtgggtggcggttatctcttatgacggtagcaacaagtactacgccgatagcgttaaaggccgcttcacgattagccgcgacaacagcaaaaataccttatacttacagatgaattctttacgcgccgaggatacggccgtttattattgtgcccgtgaccaaacgtactacgactctagcctgtcttacggctacgcgtttgatatctggggtcaatggggccagggcaccttagttacggtttctagcggtggtagcagccgttctagcagctctggcggcggcggtagcggcggtggcggcgaaattgtgctgacccagtctccagcgacgttaagcctgagcccaggcgagcgcgccaccttatcttgtcgtgccagccaaagcgttagcagctcttacctggcctggtatcaacaaaaaccgggccaagcgccacgcttactgatctacggtgccagcagccgtgccaccggcattccagcgcgtttttctggtagcggcagcggtacggattttacgttaacgatttctcgcctggagccggaggattttgccgtgtactactgtgaaacctggggctctaacacgcgcgtgttcggccagggcacgaaggttgaaatcaaa

SEQ ID NO: 424 - DNA, 744 bp, synthetic construct
  source 1..744: mol_type = other DNA
caggtgcagttagttgaaagcggcggtggtgtggtgcaaccgggtcgtagcttacgtttatcttgcgcggcctctggctttacctttagcagctatgcgatgcattgggtgcgtcaggcgccaggtaagggcttagagtgggtggcggttatctcttatgacggtagcaacaagtactacgccgatagcgttaaaggccgcttcacgattagccgcgacaacagcaaaaataccttatacttacagatgaattctttacgcgccgaggatacggccgtttattattgtgcccgtgaccgcggtggtttagttttcgatctgtggggtcaatggggccaaggcaccctggttacggttagcagcggcggctcttctcgctcttctagctctggtggcggcggctctggcggcggtggcgaaattgttctgacccaaagcccggcgaccctgagcctgagcccaggtgaacgcgccaccctgagctgtcgtgcctctcaaagcgtttcttctagctacctggcctggtatcaacagaaaccaggtcaggccccgcgcttactgatttatggtgcgtcttctcgcgcgacgggtatcccagcgcgtttttctggcagcggctctggcaccgatttcacgctgaccatttctcgcctggaaccagaggactttgccgtttattactgcaaggcgtgggattctagcacgtctgttgtgtttggccaaggtacgaaggtggagattaaa

SEQ ID NO: 425 - DNA, 750 bp, synthetic construct
  source 1..750: mol_type = other DNA
caggtgcagttagttgaaagcggcggtggtgtggtgcaaccgggtcgtagcttacgtttatcttgcgcggcctctggctttacctttagcagctatgcgatgcattgggtgcgtcaggcgccaggtaagggcttagagtgggtggcggttatctcttatgacggtagcaacaagtactacgccgatagcgttaaaggccgcttcacgattagccgcgacaacagcaaaaataccttatacttacagatgaattctttacgcgccgaggatacggccgtttattattgtgcccgtgaccgcggtggtcgcgacggttatggcatggacgtttggggccaatggggccagggcacgttagttaccgtgagcagcggtggttcttctcgcagctcttctagcggcggcggtggcagcggtggcggcggcgagattgtgttaacccagagcccggcgaccctgagcttatctccgggtgagcgtgcgaccttaagctgtcgcgccagccaatctgttagctctagctacctggcctggtatcagcaaaagccgggtcaggccccacgtctgctgatctatggtgcctctagccgcgccacgggtattccggcgcgctttagcggctctggcagcggcacggactttaccctgacgatcagccgtttagagccagaagacttcgcggtttattactgccagcaaagcgactctccaccgctgaccttcggtcaaggtaccaaggtggaaattaaa

SEQ ID NO: 426 - DNA, 768 bp, synthetic construct
  source 1..768: mol_type = other DNA
caggtgcagttagttgaaagcggcggtggtgtggtgcaaccgggtcgtagcttacgtttatcttgcgcggcctctggctttacctttagcagctatgcgatgcattgggtgcgtcaggcgccaggtaagggcttagagtgggtggcggttatctcttatgacggtagcaacaagtactacgccgatagcgttaaaggccgcttcacgattagccgcgacaacagcaaaaataccttatacttacagatgaattctttacgcgccgaggatacggccgtttattattgtgcccgtgaccgcggttaccgcggttactatgcgggtaactggtttgacccgtggggccagtggggtcaaggtaccctggtgaccgtttcttctggtggtagctctcgcagcagcagctctggcggcggtggcagcggcggtggcggcgagattgtgctgacccagagcccggcgacgttaagcttatctccgggcgaacgcgcgacgttatcttgccgcgcctctcagtctgtgtctagctcttatctggcctggtaccagcaaaaaccaggtcaggcgccgcgcctgttaatctacggcgcctcttctcgcgcgaccggcatcccggcgcgtttcagcggcagcggttctggcaccgatttcacgctgaccatctctcgcctggagccagaagactttgccgtgtattactgcggtacgtgggacagcagcctggccgcccgctgggtttttggtcagggcaccaaggttgagattaaa

SEQ ID NO: 427 - DNA, 765 bp, synthetic construct
  source 1..765: mol_type = other DNA
caggtgcagttagttgaaagcggcggtggtgtggtgcaaccgggtcgtagcttacgtttatcttgcgcggcctctggctttacctttagcagctatgcgatgcattgggtgcgtcaggcgccaggtaagggcttagagtgggtggcggttatctcttatgacggtagcaacaagtactacgccgatagcgttaaaggccgcttcacgattagccgcgacaacagcaaaaataccttatacttacagatgaattctttacgcgccgaggatacggccgtttattattgtgcccgtgaccgcggttaccgcggttactatgcgggtaactggtttgacccgtggggccagtggggtcaaggtaccctggtgaccgtttcttctggtggtagctctcgcagcagcagctctggcggcggtggcagcggcggtggcggcgagattgtgctgacccagagcccggcgacgttaagcttatctccgggcgaacgcgcgacgttatcttgccgcgcctctcagtctgtgtctagctcttatctggcctggtaccagcaaaaaccaggtcaggcgccgcgcctgttaatctacggcgcctcttctcgcgcgaccggcatcccggcgcgtttcagcggcagcggttctggcaccgatttcacgctgaccatctctcgcctggagccagaagactttgccgtgtattactgcggtacgtgggacagcagcaattctgcctgggttttcggccaaggcaccaaagttgagatcaaa

SEQ ID NO: 428 - DNA, 759 bp, synthetic construct
  source 1..759: mol_type = other DNA
caggtgcagttagttgaaagcggcggtggtgtggtgcaaccgggtcgtagcttacgtttatcttgcgcggcctctggctttacctttagcagctatgcgatgcattgggtgcgtcaggcgccaggtaagggcttagagtgggtggcggttatctcttatgacggtagcaacaagtactacgccgatagcgttaaaggccgcttcacgattagccgcgacaacagcaaaaataccttatacttacagatgaattctttacgcgccgaggatacggccgtttattattgtgcccgtgaccgcggttaccgcggttactatgcgggtaactggtttgacccgtggggccagtggggtcaaggtaccctggtgaccgtttcttctggtggtagctctcgcagcagcagctctggcggcggtggcagcggcggtggcggcgagattgtgctgacccagagcccggcgacgttaagcttatctccgggcgaacgcgcgacgttatcttgccgcgcctctcagtctgtgtctagctcttatctggcctggtaccagcaaaaaccaggtcaggcgccgcgcctgttaatctacggcgcctcttctcgcgcgaccggcatcccggcgcgtttcagcggcagcggttctggcaccgatttcacgctgaccatctctcgcctggagccagaagactttgccgtgtattactgccaacaatcttatagcccgccaccaacgttcggccaaggcaccaaagttgagatcaaa

SEQ ID NO: 429 - DNA, 765 bp, synthetic construct
  source 1..765: mol_type = other DNA
caggtgcagttagttgaaagcggcggtggtgtggtgcaaccgggtcgtagcttacgtttatcttgcgcggcctctggctttacctttagcagctatgcgatgcattgggtgcgtcaggcgccaggtaagggcttagagtgggtggcggttatctcttatgacggtagcaacaagtactacgccgatagcgttaaaggccgcttcacgattagccgcgacaacagcaaaaataccttatacttacagatgaattctttacgcgccgaggatacggccgtttattattgtgcccgtgaccgcggttaccgcggttactatgcgggtaactggtttgacccgtggggccagtggggtcaaggtaccctggtgaccgtttcttctggtggtagctctcgcagcagcagctctggcggcggtggcagcggcggtggcggcgagattgtgctgacccagagcccggcgacgttaagcttatctccgggcgaacgcgcgacgttatcttgccgcgcctctcagtctgtgtctagctcttatctggcctggtaccagcaaaaaccaggtcaggcgccgcgcctgttaatctacggcgcctcttctcgcgcgaccggcatcccggcgcgtttcagcggcagcggttctggcaccgatttcacgctgaccatctctcgcctggagccagaagactttgccgtgtattactgccaaacgttcgatcgtagcttatctggtgccgtgttcggccagggcacgaaggttgaaatcaaa

SEQ ID NO: 430 - DNA, 759 bp, synthetic construct
  source 1..759: mol_type = other DNA
caggtgcagttagttgaaagcggcggtggtgtggtgcaaccgggtcgtagcttacgtttatcttgcgcggcctctggctttacctttagcagctatgcgatgcattgggtgcgtcaggcgccaggtaagggcttagagtgggtggcggttatctcttatgacggtagcaacaagtactacgccgatagcgttaaaggccgcttcacgattagccgcgacaacagcaaaaataccttatacttacagatgaattctttacgcgccgaggatacggccgtttattattgtgcccgtgaccgcggttaccgcggttactatgcgggtaactggtttgacccgtggggccagtggggtcaaggtaccctggtgaccgtttcttctggtggtagctctcgcagcagcagctctggcggcggtggcagcggcggtggcggcgagattgtgctgacccagagcccggcgacgttaagcttatctccgggcgaacgcgcgacgttatcttgccgcgcctctcagtctgtgtctagctcttatctggcctggtaccagcaaaaaccaggtcaggcgccgcgcctgttaatctacggcgcctcttctcgcgcgaccggcatcccggcgcgtttcagcggcagcggttctggcaccgatttcacgctgaccatctctcgcctggagccagaagactttgccgtgtattactgccaaacgtgggacagctttggccaagttttcggtcagggtaccaaagtggagatcaaa

SEQ ID NO: 431 - DNA, 762 bp, synthetic construct
  source 1..762: mol_type = other DNA
caggtgcagttagttgaaagcggcggtggtgtggtgcaaccgggtcgtagcttacgtttatcttgcgcggcctctggctttacctttagcagctatgcgatgcattgggtgcgtcaggcgccaggtaagggcttagagtgggtggcggttatctcttatgacggtagcaacaagtactacgccgatagcgttaaaggccgcttcacgattagccgcgacaacagcaaaaataccttatacttacagatgaattctttacgcgccgaggatacggccgtttattattgtgcccgtgaccgcggttaccgctctcgcgaactgttctggcaatttgacttttggggccagtggggtcaaggtaccctggtgaccgtttcttctggtggtagctctcgcagcagcagctctggcggcggtggcagcggcggtggcggcgagattgtgctgacccagagcccggcgacgttaagcttatctccgggcgaacgcgcgacgttatcttgccgcgcctctcagtctgtgtctagctcttatctggcctggtaccagcaaaaaccaggtcaggcgccgcgcctgttaatctacggcgcctcttctcgcgcgaccggcatcccggcgcgtttcagcggcagcggttctggcaccgatttcacgctgaccatctctcgcctggagccagaagactttgccgtgtattactgccaagcctgggacagccgtacctctgccgttttcggccaaggcaccaaagttgagatcaaa

SEQ ID NO: 432 - DNA, 744 bp, synthetic construct
  source 1..744: mol_type = other DNA
caggtgcagttagttgaaagcggcggtggtgtggtgcaaccgggtcgtagcttacgtttatcttgcgcggcctctggctttacctttagcagctatgcgatgcattgggtgcgtcaggcgccaggtaagggcttagagtgggtggcggttatctcttatgacggtagcaacaagtactacgccgatagcgttaaaggccgcttcacgattagccgcgacaacagcaaaaataccttatacttacagatgaattctttacgcgccgaggatacggccgtttattattgtgcccgtgaccgcatcgttccagccggtagcgattactggggtcagtggggtcagggcaccttagttacggtgagcagcggcggttcttctcgctctagctcttctggcggcggcggtagcggcggtggcggcgaaatcgtgctgacgcagagcccggcgaccctgagcctgtctccaggcgagcgcgcgaccctgtcttgccgcgcctctcagtctgtttctagctcttatttagcgtggtaccagcagaagccaggccaagcgccacgcctgctgatttacggcgcctcttctcgtgccacgggtatcccggcgcgtttcagcggcagcggtagcggcaccgacttcaccctgaccatctctcgtctggagccagaggatttcgccgtgtactattgtgaaacctgggacagctacacgcacacctttggccaaggtacgaaggtggagattaaa

SEQ ID NO: 433 - DNA, 756 bp, synthetic construct
  source 1..756: mol_type = other DNA
caggtgcagttagttgaaagcggcggtggtgtggtgcaaccgggtcgtagcttacgtttatcttgcgcggcctctggctttacctttagcagctatgcgatgcattgggtgcgtcaggcgccaggtaagggcttagagtgggtggcggttatctcttatgacggtagcaacaagtactacgccgatagcgttaaaggccgcttcacgattagccgcgacaacagcaaaaataccttatacttacagatgaattctttacgcgccgaggatacggccgtttattattgtgcccgtgaccgcatcgttccagccggtagcgattactggggtcagtggggtcagggcaccttagttacggtgagcagcggcggttcttctcgctctagctcttctggcggcggcggtagcggcggtggcggcgaaatcgtgctgacgcagagcccggcgaccctgagcctgtctccaggcgagcgcgcgaccctgtcttgccgcgcctctcagtctgtttctagctcttatttagcgtggtaccagcagaagccaggccaagcgccacgcctgctgatttacggcgcctcttctcgtgccacgggtatcccggcgcgtttcagcggcagcggtagcggcaccgacttcaccctgaccatctctcgtctggagccagaggatttcgccgtgtactattgtggcgcgtgggacagctctttattaagcgcggcgggtgttttcggtcagggtaccaaagtggagatcaaa

SEQ ID NO: 434 - DNA, 753 bp, synthetic construct
  source 1..753: mol_type = other DNA
caggtgcagttagttgaaagcggcggtggtgtggtgcaaccgggtcgtagcttacgtttatcttgcgcggcctctggctttacctttagcagctatgcgatgcattgggtgcgtcaggcgccaggtaagggcttagagtgggtggcggttatctcttatgacggtagcaacaagtactacgccgatagcgttaaaggccgcttcacgattagccgcgacaacagcaaaaataccttatacttacagatgaattctttacgcgccgaggatacggccgtttattattgtgcccgtgaccgcatcgttccagccggtagcgattactggggtcagtggggtcagggcaccttagttacggtgagcagcggcggttcttctcgctctagctcttctggcggcggcggtagcggcggtggcggcgaaatcgtgctgacgcagagcccggcgaccctgagcctgtctccaggcgagcgcgcgaccctgtcttgccgcgcctctcagtctgtttctagctcttatttagcgtggtaccagcagaagccaggccaagcgccacgcctgctgatttacggcgcctcttctcgtgccacgggtatcccggcgcgtttcagcggcagcggtagcggcaccgacttcaccctgaccatctctcgtctggagccagaggatttcgccgtgtactattgtggcacctgggacagccgcttattaagcggcggcatgttcggtcaaggtaccaaggtggaaattaaa

SEQ ID NO: 435 - DNA, 744 bp, synthetic construct
  source 1..744: mol_type = other DNA
caggtgcagttagttgaaagcggcggtggtgtggtgcaaccgggtcgtagcttacgtttatcttgcgcggcctctggctttacctttagcagctatgcgatgcattgggtgcgtcaggcgccaggtaagggcttagagtgggtggcggttatctcttatgacggtagcaacaagtactacgccgatagcgttaaaggccgcttcacgattagccgcgacaacagcaaaaataccttatacttacagatgaattctttacgcgccgaggatacggccgtttattattgtgcccgtgaccgcatcgttccagccggtagcgattactggggtcagtggggtcagggcaccttagttacggtgagcagcggcggttcttctcgctctagctcttctggcggcggcggtagcggcggtggcggcgaaatcgtgctgacgcagagcccggcgaccctgagcctgtctccaggcgagcgcgcgaccctgtcttgccgcgcctctcagtctgtttctagctcttatttagcgtggtaccagcagaagccaggccaagcgccacgcctgctgatttacggcgcctcttctcgtgccacgggtatcccggcgcgtttcagcggcagcggtagcggcaccgacttcaccctgaccatctctcgtctggagccagaggatttcgccgtgtactattgtcaggcgtgggacagccgcacgggtgtgtttggccaaggtacgaaggtggagattaaa

SEQ ID NO: 436 - DNA, 750 bp, synthetic construct
  source 1..750: mol_type = other DNA
caggtgcagttagttgaaagcggcggtggtgtggtgcaaccgggtcgtagcttacgtttatcttgcgcggcctctggctttacctttagcagctatgcgatgcattgggtgcgtcaggcgccaggtaagggcttagagtgggtggcggttatctcttatgacggtagcaacaagtactacgccgatagcgttaaaggccgcttcacgattagccgcgacaacagcaaaaataccttatacttacagatgaattctttacgcgccgaggatacggccgtttattattgtgcccgtgaccgcatcgttccagccggtagcgattactggggtcagtggggtcagggcaccttagttacggtgagcagcggcggttcttctcgctctagctcttctggcggcggcggtagcggcggtggcggcgaaatcgtgctgacgcagagcccggcgaccctgagcctgtctccaggcgagcgcgcgaccctgtcttgccgcgcctctcagtctgtttctagctcttatttagcgtggtaccagcagaagccaggccaagcgccacgcctgctgatttacggcgcctcttctcgtgccacgggtatcccggcgcgtttcagcggcagcggtagcggcaccgacttcaccctgaccatctctcgtctggagccagaggatttcgccgtgtactattgtcaggcgtgggacagctcttctacggatgtggtgttcggtcaaggtaccaaggtggaaattaaa

SEQ ID NO: 437 - DNA, 744 bp, synthetic construct
  source 1..744: mol_type = other DNA
caggtgcagttagttgaaagcggcggtggtgtggtgcaaccgggtcgtagcttacgtttatcttgcgcggcctctggctttacctttagcagctatgcgatgcattgggtgcgtcaggcgccaggtaagggcttagagtgggtggcggttatctcttatgacggtagcaacaagtactacgccgatagcgttaaaggccgcttcacgattagccgcgacaacagcaaaaataccttatacttacagatgaattctttacgcgccgaggatacggccgtttattattgtgcccgtgaccgcatcgttccagccggtagcgattactggggtcagtggggtcagggcaccttagttacggtgagcagcggcggttcttctcgctctagctcttctggcggcggcggtagcggcggtggcggcgaaatcgtgctgacgcagagcccggcgaccctgagcctgtctccaggcgagcgcgcgaccctgtcttgccgcgcctctcagtctgtttctagctcttatttagcgtggtaccagcagaagccaggccaagcgccacgcctgctgatttacggcgcctcttctcgtgccacgggtatcccggcgcgtttcagcggcagcggtagcggcaccgacttcaccctgaccatctctcgtctggagccagaggatttcgccgtgtactattgtcagcagtactattcttctccatatacctttggtcaaggtacgaaagttgaaattaaa

SEQ ID NO: 438 - DNA, 744 bp, synthetic construct
  source 1..744: mol_type = other DNA
caggtgcagttagttgaaagcggcggtggtgtggtgcaaccgggtcgtagcttacgtttatcttgcgcggcctctggctttacctttagcagctatgcgatgcattgggtgcgtcaggcgccaggtaagggcttagagtgggtggcggttatctcttatgacggtagcaacaagtactacgccgatagcgttaaaggccgcttcacgattagccgcgacaacagcaaaaataccttatacttacagatgaattctttacgcgccgaggatacggccgtttattattgtgcccgtgaccgcatcgttccagccggtagcgattactggggtcagtggggtcagggcaccttagttacggtgagcagcggcggttcttctcgctctagctcttctggcggcggcggtagcggcggtggcggcgaaatcgtgctgacgcagagcccggcgaccctgagcctgtctccaggcgagcgcgcgaccctgtcttgccgcgcctctcagtctgtttctagctcttatttagcgtggtaccagcagaagccaggccaagcgccacgcctgctgatttacggcgcctcttctcgtgccacgggtatcccggcgcgtttcagcggcagcggtagcggcaccgacttcaccctgaccatctctcgtctggagccagaggatttcgccgtgtactattgtcagacctgtgattctttcggtcaggtgtttggtcaaggtacgaaagttgaaattaaa

SEQ ID NO: 439 - DNA, 744 bp, synthetic construct
  source 1..744: mol_type = other DNA
caggtgcagttagttgaaagcggcggtggtgtggtgcaaccgggtcgtagcttacgtttatcttgcgcggcctctggctttacctttagcagctatgcgatgcattgggtgcgtcaggcgccaggtaagggcttagagtgggtggcggttatctcttatgacggtagcaacaagtactacgccgatagcgttaaaggccgcttcacgattagccgcgacaacagcaaaaataccttatacttacagatgaattctttacgcgccgaggatacggccgtttattattgtgcccgtgaccgcatcgttccagccggtagcgattactggggtcagtggggtcagggcaccttagttacggtgagcagcggcggttcttctcgctctagctcttctggcggcggcggtagcggcggtggcggcgaaatcgtgctgacgcagagcccggcgaccctgagcctgtctccaggcgagcgcgcgaccctgtcttgccgcgcctctcagtctgtttctagctcttatttagcgtggtaccagcagaagccaggccaagcgccacgcctgctgatttacggcgcctcttctcgtgccacgggtatcccggcgcgtttcagcggcagcggtagcggcaccgacttcaccctgaccatctctcgtctggagccagaggatttcgccgtgtactattgtcagacctgggacagcttcggtcaagtgtttggccaaggtacgaaggtggagattaaa

SEQ ID NO: 440 - DNA, 750 bp, synthetic construct
  source 1..750: mol_type = other DNA
caggtgcagttagttgaaagcggcggtggtgtggtgcaaccgggtcgtagcttacgtttatcttgcgcggcctctggctttacctttagcagctatgcgatgcattgggtgcgtcaggcgccaggtaagggcttagagtgggtggcggttatctcttatgacggtagcaacaagtactacgccgatagcgttaaaggccgcttcacgattagccgcgacaacagcaaaaataccttatacttacagatgaattctttacgcgccgaggatacggccgtttattattgtgcccgtgaccgcatcgttccagccggtagcgattactggggtcagtggggtcagggcaccttagttacggtgagcagcggcggttcttctcgctctagctcttctggcggcggcggtagcggcggtggcggcgaaatcgtgctgacgcagagcccggcgaccctgagcctgtctccaggcgagcgcgcgaccctgtcttgccgcgcctctcagtctgtttctagctcttatttagcgtggtaccagcagaagccaggccaagcgccacgcctgctgatttacggcgcctcttctcgtgccacgggtatcccggcgcgtttcagcggcagcggtagcggcaccgacttcaccctgaccatctctcgtctggagccagaggatttcgccgtgtactattgtcaggtgtgggacagctcttctgaccattgggtgtttggtcaaggtacgaaagttgaaattaaa

SEQ ID NO: 441 - DNA, 747 bp, synthetic construct
  source 1..747: mol_type = other DNA
caggtgcagttagttgaaagcggcggtggtgtggtgcaaccgggtcgtagcttacgtttatcttgcgcggcctctggctttacctttagcagctatgcgatgcattgggtgcgtcaggcgccaggtaagggcttagagtgggtggcggttatctcttatgacggtagcaacaagtactacgccgatagcgttaaaggccgcttcacgattagccgcgacaacagcaaaaataccttatacttacagatgaattctttacgcgccgaggatacggccgtttattattgtgcccgtgaccgcaaggacttccgcatggacgtgtggggccaatggggtcagggtaccctggtgacggtttctagcggcggcagctctcgctcttcttctagcggtggtggcggcagcggtggcggcggtgaaattgtgttaacccagtctccggcgaccctgagcctgagcccgggtgagcgtgccacgctgagctgccgcgcgtctcaatctgtgtcttcttcttatttagcgtggtaccagcaaaaaccgggtcaagcgccacgtttattaatttatggcgccagctctcgcgccaccggtatcccagcccgttttagcggtagcggcagcggtaccgattttacgttaaccattagccgcttagaaccggaggacttcgcggtttactattgtgcggagtgggcggattctctgtctggtggtgtgtttggccaaggtacgaaggtggagattaaa

SEQ ID NO: 442 - DNA, 741 bp, synthetic construct
  source 1..741: mol_type = other DNA
caggtgcagttagttgaaagcggcggtggtgtggtgcaaccgggtcgtagcttacgtttatcttgcgcggcctctggctttacctttagcagctatgcgatgcattgggtgcgtcaggcgccaggtaagggcttagagtgggtggcggttatctcttatgacggtagcaacaagtactacgccgatagcgttaaaggccgcttcacgattagccgcgacaacagcaaaaataccttatacttacagatgaattctttacgcgccgaggatacggccgtttattattgtgcccgtgaccgccgcgacttaacgttagattattggggtcaatggggccaaggcaccctggttacggttagcagcggcggctcttctcgctcttctagctctggtggcggcggctctggcggcggtggcgaaattgttctgacccaaagcccggcgaccctgagcctgagcccaggtgaacgcgccaccctgagctgtcgtgcctctcaaagcgtttcttctagctacctggcctggtatcaacagaaaccaggtcaggccccgcgcttactgatttatggtgcgtcttctcgcgcgacgggtatcccagcgcgtttttctggcagcggctctggcaccgatttcacgctgaccatttctcgcctggaaccagaggactttgccgtttattactgccaagcgtgggattctcgtacggttatctttggccagggtacgaaggttgaaatcaaa

SEQ ID NO: 443 - DNA, 744 bp, synthetic construct
  source 1..744: mol_type = other DNA
caggtgcagttagttgaaagcggcggtggtgtggtgcaaccgggtcgtagcttacgtttatcttgcgcggcctctggctttacctttagcagctatgcgatgcattgggtgcgtcaggcgccaggtaagggcttagagtgggtggcggttatctcttatgacggtagcaacaagtactacgccgatagcgttaaaggccgcttcacgattagccgcgacaacagcaaaaataccttatacttacagatgaattctttacgcgccgaggatacggccgtttattattgtgcccgtgaccgccgcgacttaacgttagattattggggtcaatggggccaaggcaccctggttacggttagcagcggcggctcttctcgctcttctagctctggtggcggcggctctggcggcggtggcgaaattgttctgacccaaagcccggcgaccctgagcctgagcccaggtgaacgcgccaccctgagctgtcgtgcctctcaaagcgtttcttctagctacctggcctggtatcaacagaaaccaggtcaggccccgcgcttactgatttatggtgcgtcttctcgcgcgacgggtatcccagcgcgtttttctggcagcggctctggcaccgatttcacgctgaccatttctcgcctggaaccagaggactttgccgtttattactgccaagcgtgggattctagctctacggttgtgtttggccaaggtacgaaggtggagattaaa

SEQ ID NO: 444 - DNA, 744 bp, synthetic construct
  source 1..744: mol_type = other DNA
caggtgcagttagttgaaagcggcggtggtgtggtgcaaccgggtcgtagcttacgtttatcttgcgcggcctctggctttacctttagcagctatgcgatgcattgggtgcgtcaggcgccaggtaagggcttagagtgggtggcggttatctcttatgacggtagcaacaagtactacgccgatagcgttaaaggccgcttcacgattagccgcgacaacagcaaaaataccttatacttacagatgaattctttacgcgccgaggatacggccgtttattattgtgcccgtgaccgccgcgacttaacgttagattattggggtcaatggggccaaggcaccctggttacggttagcagcggcggctcttctcgctcttctagctctggtggcggcggctctggcggcggtggcgaaattgttctgacccaaagcccggcgaccctgagcctgagcccaggtgaacgcgccaccctgagctgtcgtgcctctcaaagcgtttcttctagctacctggcctggtatcaacagaaaccaggtcaggccccgcgcttactgatttatggtgcgtcttctcgcgcgacgggtatcccagcgcgtttttctggcagcggctctggcaccgatttcacgctgaccatttctcgcctggaaccagaggactttgccgtttattactgccaagcgtgggattctagcacgggtgttgtgtttggccaaggtacgaaggtggagattaaa

SEQ ID NO: 445 - DNA, 747 bp, synthetic construct
  source 1..747: mol_type = other DNA
caggtgcagttagttgaaagcggcggtggtgtggtgcaaccgggtcgtagcttacgtttatcttgcgcggcctctggctttacctttagcagctatgcgatgcattgggtgcgtcaggcgccaggtaagggcttagagtgggtggcggttatctcttatgacggtagcaacaagtactacgccgatagcgttaaaggccgcttcacgattagccgcgacaacagcaaaaataccttatacttacagatgaattctttacgcgccgaggatacggccgtttattattgtgcccgtgaccgccgcgacttaacgttagattattggggtcaatggggccaaggcaccctggttacggttagcagcggcggctcttctcgctcttctagctctggtggcggcggctctggcggcggtggcgaaattgttctgacccaaagcccggcgaccctgagcctgagcccaggtgaacgcgccaccctgagctgtcgtgcctctcaaagcgtttcttctagctacctggcctggtatcaacagaaaccaggtcaggccccgcgcttactgatttatggtgcgtcttctcgcgcgacgggtatcccagcgcgtttttctggcagcggctctggcaccgatttcacgctgaccatttctcgcctggaaccagaggactttgccgtttattactgccaagcgtgggattctagcacgccagacgtggtgtttggtcaaggtacgaaagttgaaattaaa

SEQ ID NO: 446 - DNA, 741 bp, synthetic construct
  source 1..741: mol_type = other DNA
caggtgcagttagttgaaagcggcggtggtgtggtgcaaccgggtcgtagcttacgtttatcttgcgcggcctctggctttacctttagcagctatgcgatgcattgggtgcgtcaggcgccaggtaagggcttagagtgggtggcggttatctcttatgacggtagcaacaagtactacgccgatagcgttaaaggccgcttcacgattagccgcgacaacagcaaaaataccttatacttacagatgaattctttacgcgccgaggatacggccgtttattattgtgcccgtgaccgccgcgacttaacgttagattattggggtcaatggggccaaggcaccctggttacggttagcagcggcggctcttctcgctcttctagctctggtggcggcggctctggcggcggtggcgaaattgttctgacccaaagcccggcgaccctgagcctgagcccaggtgaacgcgccaccctgagctgtcgtgcctctcaaagcgtttcttctagctacctggcctggtatcaacagaaaccaggtcaggccccgcgcttactgatttatggtgcgtcttctcgcgcgacgggtatcccagcgcgtttttctggcagcggctctggcaccgatttcacgctgaccatttctcgcctggaaccagaggactttgccgtttattactgccaagcgtgggattctagcacggttatctttggccagggtacgaaggttgaaatcaaa

SEQ ID NO: 447 - DNA, 741 bp, synthetic construct
  source 1..741: mol_type = other DNA
caggtgcagttagttgaaagcggcggtggtgtggtgcaaccgggtcgtagcttacgtttatcttgcgcggcctctggctttacctttagcagctatgcgatgcattgggtgcgtcaggcgccaggtaagggcttagagtgggtggcggttatctcttatgacggtagcaacaagtactacgccgatagcgttaaaggccgcttcacgattagccgcgacaacagcaaaaataccttatacttacagatgaattctttacgcgccgaggatacggccgtttattattgtgcccgtgaccgccgcgacttaacgttagattattggggtcaatggggccaaggcaccctggttacggttagcagcggcggctcttctcgctcttctagctctggtggcggcggctctggcggcggtggcgaaattgttctgacccaaagcccggcgaccctgagcctgagcccaggtgaacgcgccaccctgagctgtcgtgcctctcaaagcgtttcttctagctacctggcctggtatcaacagaaaccaggtcaggccccgcgcttactgatttatggtgcgtcttctcgcgcgacgggtatcccagcgcgtttttctggcagcggctctggcaccgatttcacgctgaccatttctcgcctggaaccagaggactttgccgtttattactgccaagcgtgggattctagcacggttgtttttggccagggtacgaaggttgaaatcaaa

SEQ ID NO: 448 - DNA, 744 bp, synthetic construct
  source 1..744: mol_type = other DNA
caggtgcagttagttgaaagcggcggtggtgtggtgcaaccgggtcgtagcttacgtttatcttgcgcggcctctggctttacctttagcagctatgcgatgcattgggtgcgtcaggcgccaggtaagggcttagagtgggtggcggttatctcttatgacggtagcaacaagtactacgccgatagcgttaaaggccgcttcacgattagccgcgacaacagcaaaaataccttatacttacagatgaattctttacgcgccgaggatacggccgtttattattgtgcccgtgaccgccgcgacttaacgttagattattggggtcaatggggccaaggcaccctggttacggttagcagcggcggctcttctcgctcttctagctctggtggcggcggctctggcggcggtggcgaaattgttctgacccaaagcccggcgaccctgagcctgagcccaggtgaacgcgccaccctgagctgtcgtgcctctcaaagcgtttcttctagctacctggcctggtatcaacagaaaccaggtcaggccccgcgcttactgatttatggtgcgtcttctcgcgcgacgggtatcccagcgcgtttttctggcagcggctctggcaccgatttcacgctgaccatttctcgcctggaaccagaggactttgccgtttattactgccaagcgtgggattctaccgccggtacggtgtttggccaaggtacgaaggtggagattaaa

SEQ ID NO: 449 - DNA, 744 bp, synthetic construct
  source 1..744: mol_type = other DNA
caggtgcagttagttgaaagcggcggtggtgtggtgcaaccgggtcgtagcttacgtttatcttgcgcggcctctggctttacctttagcagctatgcgatgcattgggtgcgtcaggcgccaggtaagggcttagagtgggtggcggttatctcttatgacggtagcaacaagtactacgccgatagcgttaaaggccgcttcacgattagccgcgacaacagcaaaaataccttatacttacagatgaattctttacgcgccgaggatacggccgtttattattgtgcccgtgaccgccgcgacttaacgttagattattggggtcaatggggccaaggcaccctggttacggttagcagcggcggctcttctcgctcttctagctctggtggcggcggctctggcggcggtggcgaaattgttctgacccaaagcccggcgaccctgagcctgagcccaggtgaacgcgccaccctgagctgtcgtgcctctcaaagcgtttcttctagctacctggcctggtatcaacagaaaccaggtcaggccccgcgcttactgatttatggtgcgtcttctcgcgcgacgggtatcccagcgcgtttttctggcagcggctctggcaccgatttcacgctgaccatttctcgcctggaaccagaggactttgccgtttattactgccaagcgtgggattctaccacggccgttgtgtttggccaaggtacgaaggtggagattaaa

SEQ ID NO: 450 - DNA, 747 bp, synthetic construct
  source 1..747: mol_type = other DNA
caggtgcagttagttgaaagcggcggtggtgtggtgcaaccgggtcgtagcttacgtttatcttgcgcggcctctggctttacctttagcagctatgcgatgcattgggtgcgtcaggcgccaggtaagggcttagagtgggtggcggttatctcttatgacggtagcaacaagtactacgccgatagcgttaaaggccgcttcacgattagccgcgacaacagcaaaaataccttatacttacagatgaattctttacgcgccgaggatacggccgtttattattgtgcccgtgaccgccgcgacttaacgttagattattggggtcaatggggccaaggcaccctggttacggttagcagcggcggctcttctcgctcttctagctctggtggcggcggctctggcggcggtggcgaaattgttctgacccaaagcccggcgaccctgagcctgagcccaggtgaacgcgccaccctgagctgtcgtgcctctcaaagcgtttcttctagctacctggcctggtatcaacagaaaccaggtcaggccccgcgcttactgatttatggtgcgtcttctcgcgcgacgggtatcccagcgcgtttttctggcagcggctctggcaccgatttcacgctgaccatttctcgcctggaaccagaggactttgccgtttattactgccaagtgtgggattctagcggtgaccaagcggtgtttggtcaaggtacgaaagttgaaattaaa

SEQ ID NO: 451 - DNA, 747 bp, synthetic construct
  source 1..747: mol_type = other DNA
caggtgcagttagttgaaagcggcggtggtgtggtgcaaccgggtcgtagcttacgtttatcttgcgcggcctctggctttacctttagcagctatgcgatgcattgggtgcgtcaggcgccaggtaagggcttagagtgggtggcggttatctcttatgacggtagcaacaagtactacgccgatagcgttaaaggccgcttcacgattagccgcgacaacagcaaaaataccttatacttacagatgaattctttacgcgccgaggatacggccgtttattattgtgcccgtgaccgccgcgacttaacgttagattattggggtcaatggggccaaggcaccctggttacggttagcagcggcggctcttctcgctcttctagctctggtggcggcggctctggcggcggtggcgaaattgttctgacccaaagcccggcgaccctgagcctgagcccaggtgaacgcgccaccctgagctgtcgtgcctctcaaagcgtttcttctagctacctggcctggtatcaacagaaaccaggtcaggccccgcgcttactgatttatggtgcgtcttctcgcgcgacgggtatcccagcgcgtttttctggcagcggctctggcaccgatttcacgctgaccatttctcgcctggaaccagaggactttgccgtttattactgccaagtgtgggattctagctctgaccaaggcgtgtttggtcaaggtacgaaagttgaaattaaa

SEQ ID NO: 452 - DNA, 774 bp, synthetic construct
  source 1..774: mol_type = other DNA
caggtgcagttagttgaaagcggcggtggtgtggtgcaaccgggtcgtagcttacgtttatcttgcgcggcctctggctttacctttagcagctatgcgatgcattgggtgcgtcaggcgccaggtaagggcttagagtgggtggcggttatctcttatgacggtagcaacaagtactacgccgatagcgttaaaggccgcttcacgattagccgcgacaacagcaaaaataccttatacttacagatgaattctttacgcgccgaggatacggccgtttattattgtgcccgtgactctggtggttaccgcacgagcggcccatactttcaaggctatgcgatggacgtttggggtcagtggggccagggcacgttagttacggttagctctggtggcagcagccgcagcagctctagcggcggcggtggcagcggtggcggcggcgaaattgtgctgacccaatctccggccacgctgagcctgtctccgggtgagcgcgcgacgttatcttgccgcgcgtctcagtctgtgagctcttcttatttagcgtggtaccaacagaaaccgggtcaggccccacgcctgttaatctacggtgcgagcagccgcgcgaccggcatcccggcgcgtttctctggcagcggctctggtaccgatttcacgttaaccatctctcgtttagaaccagaagatttcgcggtttactactgcgaaacctgggactctttcaaccatttagtgtttggccaaggtacgaaagttgagattaaa

SEQ ID NO: 453 - DNA, 771 bp, synthetic construct
  source 1..771: mol_type = other DNA
caggtgcagttagttgaaagcggcggtggtgtggtgcaaccgggtcgtagcttacgtttatcttgcgcggcctctggctttacctttagcagctatgcgatgcattgggtgcgtcaggcgccaggtaagggcttagagtgggtggcggttatctcttatgacggtagcaacaagtactacgccgatagcgttaaaggccgcttcacgattagccgcgacaacagcaaaaataccttatacttacagatgaattctttacgcgccgaggatacggccgtttattattgtgcccgtgactctggtggttaccgcacgagcggcccatactttcaaggctatgcgatggacgtttggggtcagtggggccagggcacgttagttacggttagctctggtggcagcagccgcagcagctctagcggcggcggtggcagcggtggcggcggcgaaattgtgctgacccaatctccggccacgctgagcctgtctccgggtgagcgcgcgacgttatcttgccgcgcgtctcagtctgtgagctcttcttatttagcgtggtaccaacagaaaccgggtcaggccccacgcctgttaatctacggtgcgagcagccgcgcgaccggcatcccggcgcgtttctctggcagcggctctggtaccgatttcacgttaaccatctctcgtttagaaccagaagatttcgcggtttactactgcatgcaggcgacgcaattcccacgtacgtttggccagggtacgaaggtggagatcaaa

SEQ ID NO: 454 - DNA, 771 bp, synthetic construct
  source 1..771: mol_type = other DNA
caggtgcagttagttgaaagcggcggtggtgtggtgcaaccgggtcgtagcttacgtttatcttgcgcggcctctggctttacctttagcagctatgcgatgcattgggtgcgtcaggcgccaggtaagggcttagagtgggtggcggttatctcttatgacggtagcaacaagtactacgccgatagcgttaaaggccgcttcacgattagccgcgacaacagcaaaaataccttatacttacagatgaattctttacgcgccgaggatacggccgtttattattgtgcccgtgactctggtggttaccgcacgagcggcccatactttcaaggctatgcgatggacgtttggggtcagtggggccagggcacgttagttacggttagctctggtggcagcagccgcagcagctctagcggcggcggtggcagcggtggcggcggcgaaattgtgctgacccaatctccggccacgctgagcctgtctccgggtgagcgcgcgacgttatcttgccgcgcgtctcagtctgtgagctcttcttatttagcgtggtaccaacagaaaccgggtcaggccccacgcctgttaatctacggtgcgagcagccgcgcgaccggcatcccggcgcgtttctctggcagcggctctggtaccgatttcacgttaaccatctctcgtttagaaccagaagatttcgcggtttactactgccagcattacgactctacgccgatcacctttggccaaggtacgaaagttgagattaaa

SEQ ID NO: 455 - DNA, 777 bp, synthetic construct
  source 1..777: mol_type = other DNA
caggtgcagttagttgaaagcggcggtggtgtggtgcaaccgggtcgtagcttacgtttatcttgcgcggcctctggctttacctttagcagctatgcgatgcattgggtgcgtcaggcgccaggtaagggcttagagtgggtggcggttatctcttatgacggtagcaacaagtactacgccgatagcgttaaaggccgcttcacgattagccgcgacaacagcaaaaataccttatacttacagatgaattctttacgcgccgaggatacggccgtttattattgtgcccgtgactctggtggttaccgcacgagcggcccatactttcaaggctatgcgatggacgtttggggtcagtggggccagggcacgttagttacggttagctctggtggcagcagccgcagcagctctagcggcggcggtggcagcggtggcggcggcgaaattgtgctgacccaatctccggccacgctgagcctgtctccgggtgagcgcgcgacgttatcttgccgcgcgtctcagtctgtgagctcttcttatttagcgtggtaccaacagaaaccgggtcaggccccacgcctgttaatctacggtgcgagcagccgcgcgaccggcatcccggcgcgtttctctggcagcggctctggtaccgatttcacgttaaccatctctcgtttagaaccagaagatttcgcggtttactactgccagcagtacggttcttctagcccagattataccttcggtcaaggcacgaaggtggagattaaa

SEQ ID NO: 456 - DNA, 774 bp, synthetic construct
  source 1..774: mol_type = other DNA
caggtgcagttagttgaaagcggcggtggtgtggtgcaaccgggtcgtagcttacgtttatcttgcgcggcctctggctttacctttagcagctatgcgatgcattgggtgcgtcaggcgccaggtaagggcttagagtgggtggcggttatctcttatgacggtagcaacaagtactacgccgatagcgttaaaggccgcttcacgattagccgcgacaacagcaaaaataccttatacttacagatgaattctttacgcgccgaggatacggccgtttattattgtgcccgtgactctggtggttaccgcacgagcggcccatactttcaaggctatgcgatggacgtttggggtcagtggggccagggcacgttagttacggttagctctggtggcagcagccgcagcagctctagcggcggcggtggcagcggtggcggcggcgaaattgtgctgacccaatctccggccacgctgagcctgtctccgggtgagcgcgcgacgttatcttgccgcgcgtctcagtctgtgagctcttcttatttagcgtggtaccaacagaaaccgggtcaggccccacgcctgttaatctacggtgcgagcagccgcgcgaccggcatcccggcgcgtttctctggcagcggctctggtaccgatttcacgttaaccatctctcgtttagaaccagaagatttcgcggtttactactgccagagctacgactcttctaatcacgtggtgtttggtcaaggtaccaaggttgaaatcaaa

SEQ ID NO: 457 - DNA, 771 bp, synthetic construct
  source 1..771: mol_type = other DNA
caggtgcagttagttgaaagcggcggtggtgtggtgcaaccgggtcgtagcttacgtttatcttgcgcggcctctggctttacctttagcagctatgcgatgcattgggtgcgtcaggcgccaggtaagggcttagagtgggtggcggttatctcttatgacggtagcaacaagtactacgccgatagcgttaaaggccgcttcacgattagccgcgacaacagcaaaaataccttatacttacagatgaattctttacgcgccgaggatacggccgtttattattgtgcccgtgactctggtggttaccgcacgagcggcccatactttcaaggctatgcgatggacgtttggggtcagtggggccagggcacgttagttacggttagctctggtggcagcagccgcagcagctctagcggcggcggtggcagcggtggcggcggcgaaattgtgctgacccaatctccggccacgctgagcctgtctccgggtgagcgcgcgacgttatcttgccgcgcgtctcagtctgtgagctcttcttatttagcgtggtaccaacagaaaccgggtcaggccccacgcctgttaatctacggtgcgagcagccgcgcgaccggcatcccggcgcgtttctctggcagcggctctggtaccgatttcacgttaaccatctctcgtttagaaccagaagatttcgcggtttactactgccagacctgggactctttcggtcaggtttttggccagggtacgaaggtggagatcaaa

SEQ ID NO: 458 - DNA, 777 bp, synthetic construct
  source 1..777: mol_type = other DNA
caggtgcagttagttgaaagcggcggtggtgtggtgcaaccgggtcgtagcttacgtttatcttgcgcggcctctggctttacctttagcagctatgcgatgcattgggtgcgtcaggcgccaggtaagggcttagagtgggtggcggttatctcttatgacggtagcaacaagtactacgccgatagcgttaaaggccgcttcacgattagccgcgacaacagcaaaaataccttatacttacagatgaattctttacgcgccgaggatacggccgtttattattgtgcccgtgactctggtggttaccgcacgagcggcccatactttcaaggctatgcgatggacgtttggggtcagtggggccagggcacgttagttacggttagctctggtggcagcagccgcagcagctctagcggcggcggtggcagcggtggcggcggcgaaattgtgctgacccaatctccggccacgctgagcctgtctccgggtgagcgcgcgacgttatcttgccgcgcgtctcagtctgtgagctcttcttatttagcgtggtaccaacagaaaccgggtcaggccccacgcctgttaatctacggtgcgagcagccgcgcgaccggcatcccggcgcgtttctctggcagcggctctggtaccgatttcacgttaaccatctctcgtttagaaccagaagatttcgcggtttactactgcagcgcgtgggactcttctcgcagcgccggcgtgtttggtcaaggtaccaaggttgaaatcaaa

SEQ ID NO: 459 - DNA, 747 bp, synthetic construct
  source 1..747: mol_type = other DNA
caggtgcagttagttgaaagcggcggtggtgtggtgcaaccgggtcgtagcttacgtttatcttgcgcggcctctggctttacctttagcagctatgcgatgcattgggtgcgtcaggcgccaggtaagggcttagagtgggtggcggttatctcttatgacggtagcaacaagtactacgccgatagcgttaaaggccgcttcacgattagccgcgacaacagcaaaaataccttatacttacagatgaattctttacgcgccgaggatacggccgtttattattgtgcccgtgactctggtacgttctctacggattattggggtcaatggggccaaggcaccctggttacggttagcagcggcggctcttctcgctcttctagctctggtggcggcggctctggcggcggtggcgaaattgttctgacccaaagcccggcgaccctgagcctgagcccaggtgaacgcgccaccctgagctgtcgtgcctctcaaagcgtttcttctagctacctggcctggtatcaacagaaaccaggtcaggccccgcgcttactgatttatggtgcgtcttctcgcgcgacgggtatcccagcgcgtttttctggcagcggctctggcaccgatttcacgctgaccatttctcgcctggaaccagaggactttgccgtttattactgctctagctatacgagctcttctacgctggtggtgttcggtcaaggtaccaaggtggaaattaaa

SEQ ID NO: 460 - DNA, 783 bp, synthetic construct
  source 1..783: mol_type = other DNA
caggtgcagttagttgaaagcggcggtggtgtggtgcaaccgggtcgtagcttacgtttatcttgcgcggcctctggctttacctttagcagctatgcgatgcattgggtgcgtcaggcgccaggtaagggcttagagtgggtggcggttatctcttatgacggtagcaacaagtactacgccgatagcgttaaaggccgcttcacgattagccgcgacaacagcaaaaataccttatacttacagatgaattctttacgcgccgaggatacggccgtttattattgtgcccgtgactctttataccgcggtggtggctatttatactatgccagctggtggatggatctgtggggtcaatggggtcagggcaccctggttacggtttcttctggcggttctagccgtagctctagcagcggtggcggcggctctggcggcggtggcgaaattgtgctgacccagagcccagccaccttatctctgagcccgggtgaacgcgccacgctgtcttgtcgcgcgtctcagtctgtgtctagcagctacttagcgtggtaccagcaaaagccgggccaggccccgcgcttattaatttacggtgcctctagccgtgcgacgggcattccggcccgttttagcggttctggcagcggcacggactttaccttaacgatcagccgcttagaaccagaagactttgcggtttattactgtggtacctgggataattctttatctgacggccactatgtgtttggtcaaggtaccaaggttgaaatcaaa

SEQ ID NO: 461 - DNA, 744 bp, synthetic construct
  source 1..744: mol_type = other DNA
caggtgcagttagttgaaagcggcggtggtgtggtgcaaccgggtcgtagcttacgtttatcttgcgcggcctctggctttacctttagcagctatgcgatgcattgggtgcgtcaggcgccaggtaagggcttagagtgggtggcggttatctcttatgacggtagcaacaagtactacgccgatagcgttaaaggccgcttcacgattagccgcgacaacagcaaaaataccttatacttacagatgaattctttacgcgccgaggatacggccgtttattattgtgcccgtgactcttctaactggttcggtatcgatcattggggtcaatggggccaaggcaccctggttacggttagcagcggcggctcttctcgctcttctagctctggtggcggcggctctggcggcggtggcgaaattgttctgacccaaagcccggcgaccctgagcctgagcccaggtgaacgcgccaccctgagctgtcgtgcctctcaaagcgtttcttctagctacctggcctggtatcaacagaaaccaggtcaggccccgcgcttactgatttatggtgcgtcttctcgcgcgacgggtatcccagcgcgtttttctggcagcggctctggcaccgatttcacgctgaccatttctcgcctggaaccagaggactttgccgtttattactgccaaagcgcggacagctctggtgccatttttggccaaggtacgaaggtggagattaaa

SEQ ID NO: 462 - DNA, 750 bp, synthetic construct
  source 1..750: mol_type = other DNA
caggtgcagttagttgaaagcggcggtggtgtggtgcaaccgggtcgtagcttacgtttatcttgcgcggcctctggctttacctttagcagctatgcgatgcattgggtgcgtcaggcgccaggtaagggcttagagtgggtggcggttatctcttatgacggtagcaacaagtactacgccgatagcgttaaaggccgcttcacgattagccgcgacaacagcaaaaataccttatacttacagatgaattctttacgcgccgaggatacggccgtttattattgtgcccgtgacacgggttaccgcggtacgagcatgctgatcgaccattggggtcagtggggccagggtacgttagtgaccgtgagctctggtggttcttctcgttcttctagcagcggcggtggcggctctggcggcggcggtgaaattgttctgacccagagcccggcgaccctgtctttaagcccaggtgaacgtgcgacgctgtcttgtcgcgcgtctcaatctgtgtctagctcttatttagcgtggtatcaacaaaaaccaggccaagccccgcgtctgttaatttacggtgccagctctcgcgccacgggcattccggcccgttttagcggtagcggcagcggtacggattttaccttaacgattagccgcttagagccggaggactttgccgtgtactattgcatgcaaggcttacaaggtccgacctttggtcaaggtacgaaagttgaaattaaa

SEQ ID NO: 463 - DNA, 756 bp, synthetic construct
  source 1..756: mol_type = other DNA
caggtgcagttagttgaaagcggcggtggtgtggtgcaaccgggtcgtagcttacgtttatcttgcgcggcctctggctttacctttagcagctatgcgatgcattgggtgcgtcaggcgccaggtaagggcttagagtgggtggcggttatctcttatgacggtagcaacaagtactacgccgatagcgttaaaggccgcttcacgattagccgcgacaacagcaaaaataccttatacttacagatgaattctttacgcgccgaggatacggccgtttattattgtgcccgtgacacgggttaccgcggtacgagcatgctgatcgaccattggggtcagtggggccagggtacgttagtgaccgtgagctctggtggttcttctcgttcttctagcagcggcggtggcggctctggcggcggcggtgaaattgttctgacccagagcccggcgaccctgtctttaagcccaggtgaacgtgcgacgctgtcttgtcgcgcgtctcaatctgtgtctagctcttatttagcgtggtatcaacaaaaaccaggccaagccccgcgtctgttaatttacggtgccagctctcgcgccacgggcattccggcccgttttagcggtagcggcagcggtacggattttaccttaacgattagccgcttagagccggaggactttgccgtgtactattgcatgcaaggcacgcacggtcgtccgagcacgttcggtcaaggcacgaaagtggaaatcaaa

SEQ ID NO: 464 - DNA, 741 bp, synthetic construct
  source 1..741: mol_type = other DNA
caggtgcagttagttgaaagcggcggtggtgtggtgcaaccgggtcgtagcttacgtttatcttgcgcggcctctggctttacctttagcagctatgcgatgcattgggtgcgtcaggcgccaggtaagggcttagagtgggtggcggttatctcttatgacggtagcaacaagtactacgccgatagcgttaaaggccgcttcacgattagccgcgacaacagcaaaaataccttatacttacagatgaattctttacgcgccgaggatacggccgtttattattgtgcccgtgacgttttcccatactggttcgacagctggggccaatggggtcagggtaccctggtgacggtttctagcggcggcagctctcgctcttcttctagcggtggtggcggcagcggtggcggcggtgaaattgtgttaacccagtctccggcgaccctgagcctgagcccgggtgagcgtgccacgctgagctgccgcgcgtctcaatctgtgtcttcttcttatttagcgtggtaccagcaaaaaccgggtcaagcgccacgtttattaatttatggcgccagctctcgcgccaccggtatcccagcccgttttagcggtagcggcagcggtaccgattttacgttaaccattagccgcttagaaccggaggacttcgcggtttactattgtcagtcttatgcgggtcgtcacgttgtttttggccagggtacgaaggttgaaatcaaa

SEQ ID NO: 465 - DNA, 738 bp, synthetic construct
  source 1..738: mol_type = other DNA
caggtgcagttagttgaaagcggcggtggtgtggtgcaaccgggtcgtagcttacgtttatcttgcgcggcctctggctttacctttagcagctatgcgatgcattgggtgcgtcaggcgccaggtaagggcttagagtgggtggcggttatctcttatgacggtagcaacaagtactacgccgatagcgttaaaggccgcttcacgattagccgcgacaacagcaaaaataccttatacttacagatgaattctttacgcgccgaggatacggccgtttattattgtgcccgtgacgttggtcgcggtcgcgactattggggccaatggggtcagggtaccctggtgacggtttctagcggcggcagctctcgctcttcttctagcggtggtggcggcagcggtggcggcggtgaaattgtgttaacccagtctccggcgaccctgagcctgagcccgggtgagcgtgccacgctgagctgccgcgcgtctcaatctgtgtcttcttcttatttagcgtggtaccagcaaaaaccgggtcaagcgccacgtttattaatttatggcgccagctctcgcgccaccggtatcccagcccgttttagcggtagcggcagcggtaccgattttacgttaaccattagccgcttagaaccggaggacttcgcggtttactattgtcagcaaagctattctccgccaatcacgtttggccagggtacgaaggttgaaatcaaa

SEQ ID NO: 466 - DNA, 768 bp, synthetic construct
  source 1..768: mol_type = other DNA
caggtgcagttagttgaaagcggcggtggtgtggtgcaaccgggtcgtagcttacgtttatcttgcgcggcctctggctttacctttagcagctatgcgatgcattgggtgcgtcaggcgccaggtaagggcttagagtgggtggcggttatctcttatgacggtagcaacaagtactacgccgatagcgttaaaggccgcttcacgattagccgcgacaacagcaaaaataccttatacttacagatgaattctttacgcgccgaggatacggccgtttattattgtgcccgtgacgttatcgttgttggttcttggacctatgccttcggctactggggccagtggggccaaggtacgctggtgaccgtgtcttctggtggttctagccgctctagcagcagcggtggcggcggtagcggcggcggtggcgaaatcgtgctgacccagagcccggcgaccttatctctgtctccaggcgaacgtgccaccttatcttgtcgtgcctctcaaagcgttagctctagctacctggcgtggtaccaacagaagccgggtcaagcgccgcgtttactgatctacggtgcgtcttctcgcgccaccggcattccagcgcgtttttctggcagcggctctggtaccgattttacgttaaccatttctcgcttagaaccagaggatttcgcggtttattattgtggcacgtgggactctagcctgaccggtttatctggtgtgttcggccagggcacgaaggttgaaatcaaa

SEQ ID NO: 467 - DNA, 777 bp, synthetic construct
  source 1..777: mol_type = other DNA
caggtgcagttagttgaaagcggcggtggtgtggtgcaaccgggtcgtagcttacgtttatcttgcgcggcctctggctttacctttagcagctatgcgatgcattgggtgcgtcaggcgccaggtaagggcttagagtgggtggcggttatctcttatgacggtagcaacaagtactacgccgatagcgttaaaggccgcttcacgattagccgcgacaacagcaaaaataccttatacttacagatgaattctttacgcgccgaggatacggccgtttattattgtgcccgtgacgttaagaactaccgcgcctatgaattacacagcttaaattttatggatgtttggggtcaatggggccagggcaccttagttacggtttctagcggtggtagcagccgttctagcagctctggcggcggcggtagcggcggtggcggcgaaattgtgctgacccagtctccagcgacgttaagcctgagcccaggcgagcgcgccaccttatcttgtcgtgccagccaaagcgttagcagctcttacctggcctggtatcaacaaaaaccgggccaagcgccacgcttactgatctacggtgccagcagccgtgccaccggcattccagcgcgtttttctggtagcggcagcggtacggattttacgttaacgatttctcgcctggagccggaggattttgccgtgtactactgtcaggtgtgggattcttcttcttctgatcgcgtggtgtttggtcaaggtaccaaggttgaaatcaaa

SEQ ID NO: 468 - DNA, 753 bp, synthetic construct
  source 1..753: mol_type = other DNA
caggtgcagttagttgaaagcggcggtggtgtggtgcaaccgggtcgtagcttacgtttatcttgcgcggcctctggctttacctttagcagctatgcgatgcattgggtgcgtcaggcgccaggtaagggcttagagtgggtggcggttatctcttatgacggtagcaacaagtactacgccgatagcgttaaaggccgcttcacgattagccgcgacaacagcaaaaataccttatacttacagatgaattctttacgcgccgaggatacggccgtttattattgtgcccgtgacgtttctggtgacggtttcgatttttggggtcaatggggccaaggcaccctggttacggttagcagcggcggctcttctcgctcttctagctctggtggcggcggctctggcggcggtggcgaaattgttctgacccaaagcccggcgaccctgagcctgagcccaggtgaacgcgccaccctgagctgtcgtgcctctcaaagcgtttcttctagctacctggcctggtatcaacagaaaccaggtcaggccccgcgcttactgatttatggtgcgtcttctcgcgcgacgggtatcccagcgcgtttttctggcagcggctctggcaccgatttcacgctgaccatttctcgcctggaaccagaggactttgccgtttattactgccaaagctatgacagctctttattaggcccgtatgttgttttcggtcagggtaccaaagtggagatcaaa

SEQ ID NO: 469 - DNA, 759 bp, synthetic construct
  source 1..759: mol_type = other DNA
caggtgcagttagttgaaagcggcggtggtgtggtgcaaccgggtcgtagcttacgtttatcttgcgcggcctctggctttacctttagcagctatgcgatgcattgggtgcgtcaggcgccaggtaagggcttagagtgggtggcggttatctcttatgacggtagcaacaagtactacgccgatagcgttaaaggccgcttcacgattagccgcgacaacagcaaaaataccttatacttacagatgaattctttacgcgccgaggatacggccgtttattattgtgcccgtgaggccgtttctccatactctaatagcccacgcgcggactattggggccagtggggtcaaggtaccctggtgaccgtttcttctggtggtagctctcgcagcagcagctctggcggcggtggcagcggcggtggcggcgagattgtgctgacccagagcccggcgacgttaagcttatctccgggcgaacgcgcgacgttatcttgccgcgcctctcagtctgtgtctagctcttatctggcctggtaccagcaaaaaccaggtcaggcgccgcgcctgttaatctacggcgcctcttctcgcgcgaccggcatcccggcgcgtttcagcggcagcggttctggcaccgatttcacgctgaccatctctcgcctggagccagaagactttgccgtgtattactgccaagcctgggacagcaccccgggtgttgttttcggccaaggcaccaaagttgagatcaaa

SEQ ID NO: 470 - DNA, 741 bp, synthetic construct
  source 1..741: mol_type = other DNA
caggtgcagttagttgaaagcggcggtggtgtggtgcaaccgggtcgtagcttacgtttatcttgcgcggcctctggctttacctttagcagctatgcgatgcattgggtgcgtcaggcgccaggtaagggcttagagtgggtggcggttatctcttatgacggtagcaacaagtactacgccgatagcgttaaaggccgcttcacgattagccgcgacaacagcaaaaataccttatacttacagatgaattctttacgcgccgaggatacggccgtttattattgtgcccgtgagggtggtttcggtgcctctgattattggggtcaatggggccaaggcaccctggttacggttagcagcggcggctcttctcgctcttctagctctggtggcggcggctctggcggcggtggcgaaattgttctgacccaaagcccggcgaccctgagcctgagcccaggtgaacgcgccaccctgagctgtcgtgcctctcaaagcgtttcttctagctacctggcctggtatcaacagaaaccaggtcaggccccgcgcttactgatttatggtgcgtcttctcgcgcgacgggtatcccagcgcgtttttctggcagcggctctggcaccgatttcacgctgaccatttctcgcctggaaccagaggactttgccgtttattactgccaacaggcgaacagcccaccaatcacctttggccaaggtacgaaggtggagattaaa

SEQ ID NO: 471 - DNA, 747 bp, synthetic construct
  source 1..747: mol_type = other DNA
caggtgcagttagttgaaagcggcggtggtgtggtgcaaccgggtcgtagcttacgtttatcttgcgcggcctctggctttacctttagcagctatgcgatgcattgggtgcgtcaggcgccaggtaagggcttagagtgggtggcggttatctcttatgacggtagcaacaagtactacgccgatagcgttaaaggccgcttcacgattagccgcgacaacagcaaaaataccttatacttacagatgaattctttacgcgccgaggatacggccgtttattattgtgcccgtgagggtggtcgcttaggtttcgatccgtggggtcaatggggccaaggcaccctggttacggttagcagcggcggctcttctcgctcttctagctctggtggcggcggctctggcggcggtggcgaaattgttctgacccaaagcccggcgaccctgagcctgagcccaggtgaacgcgccaccctgagctgtcgtgcctctcaaagcgtttcttctagctacctggcctggtatcaacagaaaccaggtcaggccccgcgcttactgatttatggtgcgtcttctcgcgcgacgggtatcccagcgcgtttttctggcagcggctctggcaccgatttcacgctgaccatttctcgcctggaaccagaggactttgccgtttattactgcggtacctgggattctagcgccccagccgtggtgtttggtcaaggtacgaaagttgaaattaaa

SEQ ID NO: 472 - DNA, 738 bp, synthetic construct
  source 1..738: mol_type = other DNA
caggtgcagttagttgaaagcggcggtggtgtggtgcaaccgggtcgtagcttacgtttatcttgcgcggcctctggctttacctttagcagctatgcgatgcattgggtgcgtcaggcgccaggtaagggcttagagtgggtggcggttatctcttatgacggtagcaacaagtactacgccgatagcgttaaaggccgcttcacgattagccgcgacaacagcaaaaataccttatacttacagatgaattctttacgcgccgaggatacggccgtttattattgtgcccgtgagggtcgccgcggtatggacgtttggggccagtggggtcaaggcacgctggtgaccgtttcttctggcggcagcagccgctcttcttcttctggcggtggtggcagcggcggtggcggcgagattgtgctgacgcagagcccagcgaccctgagcctgagcccgggcgagcgcgcgacgttaagctgccgtgccagccaatctgttagctcttcttacctggcctggtatcaacagaagccgggccaagccccgcgcctgttaatctatggcgcgtctagccgcgccacgggcatcccagcccgctttagcggctctggcagcggcacggattttaccttaacgattagccgtttagagccggaagacttcgccgtgtactactgccaacaggaggatagcccaccgatcacgttcggccagggcacgaaggttgagattaaa

SEQ ID NO: 473 - DNA, 759 bp, synthetic construct
  source 1..759: mol_type = other DNA
caggtgcagttagttgaaagcggcggtggtgtggtgcaaccgggtcgtagcttacgtttatcttgcgcggcctctggctttacctttagcagctatgcgatgcattgggtgcgtcaggcgccaggtaagggcttagagtgggtggcggttatctcttatgacggtagcaacaagtactacgccgatagcgttaaaggccgcttcacgattagccgcgacaacagcaaaaataccttatacttacagatgaattctttacgcgccgaggatacggccgtttattattgtgcccgtgagggttctggttacgagtctgatagctcttctcgtgttgattattggggccaatggggtcaaggcaccctggtgacggtttcttctggtggctcttctcgtagcagctctagcggcggtggcggcagcggtggcggcggtgaaattgtgctgacccagagcccggccacgctgtctttaagcccgggcgagcgtgccacgttaagctgtcgcgccagccaaagcgttagctctagctatttagcctggtatcaacagaagccaggccaggcgccacgtttattaatctatggtgcctcttctcgtgcgaccggtattccggcgcgctttagcggctctggtagcggcaccgacttcaccctgacgatctctcgtttagagccggaggatttcgcggtgtactattgtcaacaagcgtatagcccaccagttacgtttggtcagggcaccaaggttgagattaaa

SEQ ID NO: 474 - DNA, 756 bp, synthetic construct
  source 1..756: mol_type = other DNA
caggtgcagttagttgaaagcggcggtggtgtggtgcaaccgggtcgtagcttacgtttatcttgcgcggcctctggctttacctttagcagctatgcgatgcattgggtgcgtcaggcgccaggtaagggcttagagtgggtggcggttatctcttatgacggtagcaacaagtactacgccgatagcgttaaaggccgcttcacgattagccgcgacaacagcaaaaataccttatacttacagatgaattctttacgcgccgaggatacggccgtttattattgtgcccgtgagggttaccgctgtgcctcttgcggcgccttcgatgtttggggccagtggggccaaggtacgctggtgaccgtgtcttctggtggttctagccgctctagcagcagcggtggcggcggtagcggcggcggtggcgaaatcgtgctgacccagagcccggcgaccttatctctgtctccaggcgaacgtgccaccttatcttgtcgtgcctctcaaagcgttagctctagctacctggcgtggtaccaacagaagccgggtcaagcgccgcgtttactgatctacggtgcgtcttctcgcgccaccggcattccagcgcgtttttctggcagcggctctggtaccgattttacgttaaccatttctcgcttagaaccagaggatttcgcggtttattattgtggcacgtgggactctagcctgagcggtgttttcggtcagggtaccaaagtggagatcaaa

SEQ ID NO: 475 - DNA, 759 bp, synthetic construct
  source 1..759: mol_type = other DNA
caggtgcagttagttgaaagcggcggtggtgtggtgcaaccgggtcgtagcttacgtttatcttgcgcggcctctggctttacctttagcagctatgcgatgcattgggtgcgtcaggcgccaggtaagggcttagagtgggtggcggttatctcttatgacggtagcaacaagtactacgccgatagcgttaaaggccgcttcacgattagccgcgacaacagcaaaaataccttatacttacagatgaattctttacgcgccgaggatacggccgtttattattgtgcccgtgagaacttatggtctgcctctggtggcgcgccatctatggatccatggggccagtggggccaaggtacgctggtgaccgtgtcttctggtggttctagccgctctagcagcagcggtggcggcggtagcggcggcggtggcgaaatcgtgctgacccagagcccggcgaccttatctctgtctccaggcgaacgtgccaccttatcttgtcgtgcctctcaaagcgttagctctagctacctggcgtggtaccaacagaagccgggtcaagcgccgcgtttactgatctacggtgcgtcttctcgcgccaccggcattccagcgcgtttttctggcagcggctctggtaccgattttacgttaaccatttctcgcttagaaccagaggatttcgcggtttattattgtacccaatctttacagccgccgatcgttttcggtcagggtaccaaagtggagatcaaa

SEQ ID NO: 476 - DNA, 762 bp, synthetic construct
  source 1..762: mol_type = other DNA
caggtgcagttagttgaaagcggcggtggtgtggtgcaaccgggtcgtagcttacgtttatcttgcgcggcctctggctttacctttagcagctatgcgatgcattgggtgcgtcaggcgccaggtaagggcttagagtgggtggcggttatctcttatgacggtagcaacaagtactacgccgatagcgttaaaggccgcttcacgattagccgcgacaacagcaaaaataccttatacttacagatgaattctttacgcgccgaggatacggccgtttattattgtgcccgtgagccataccgcgttcgcttatttcgttacatggactattggggtcagtggggccagggtacgttagtgaccgtgagctctggtggttcttctcgttcttctagcagcggcggtggcggctctggcggcggcggtgaaattgttctgacccagagcccggcgaccctgtctttaagcccaggtgaacgtgcgacgctgtcttgtcgcgcgtctcaatctgtgtctagctcttatttagcgtggtatcaacaaaaaccaggccaagccccgcgtctgttaatttacggtgccagctctcgcgccacgggcattccggcccgttttagcggtagcggcagcggtacggattttaccttaacgattagccgcttagagccggaggactttgccgtgtactattgccaaagctacgactctcgtctgagcggtttctacgtttttggtcagggcaccaaggttgagattaaa

SEQ ID NO: 477 - DNA, 759 bp, synthetic construct
  source 1..759: mol_type = other DNA
caggtgcagttagttgaaagcggcggtggtgtggtgcaaccgggtcgtagcttacgtttatcttgcgcggcctctggctttacctttagcagctatgcgatgcattgggtgcgtcaggcgccaggtaagggcttagagtgggtggcggttatctcttatgacggtagcaacaagtactacgccgatagcgttaaaggccgcttcacgattagccgcgacaacagcaaaaataccttatacttacagatgaattctttacgcgccgaggatacggccgtttattattgtgcccgtgagcgcgccggttacggtgtttggagcgcgacgcgcatggattactggggccagtggggccaaggtacgctggtgaccgtgtcttctggtggttctagccgctctagcagcagcggtggcggcggtagcggcggcggtggcgaaatcgtgctgacccagagcccggcgaccttatctctgtctccaggcgaacgtgccaccttatcttgtcgtgcctctcaaagcgttagctctagctacctggcgtggtaccaacagaagccgggtcaagcgccgcgtttactgatctacggtgcgtcttctcgcgccaccggcattccagcgcgtttttctggcagcggctctggtaccgattttacgttaaccatttctcgcttagaaccagaggatttcgcggtttattattgtcagcaagcctacagcccgccggttacgttcggtcagggtaccaaagtggagatcaaa

SEQ ID NO: 478 - DNA, 762 bp, synthetic construct
  source 1..762: mol_type = other DNA
caggtgcagttagttgaaagcggcggtggtgtggtgcaaccgggtcgtagcttacgtttatcttgcgcggcctctggctttacctttagcagctatgcgatgcattgggtgcgtcaggcgccaggtaagggcttagagtgggtggcggttatctcttatgacggtagcaacaagtactacgccgatagcgttaaaggccgcttcacgattagccgcgacaacagcaaaaataccttatacttacagatgaattctttacgcgccgaggatacggccgtttattattgtgcccgtgagcgcttccaaacgatctcttataccacgggttttgacatttggggccagtggggtcaaggtaccctggtgaccgtttcttctggtggtagctctcgcagcagcagctctggcggcggtggcagcggcggtggcggcgagattgtgctgacccagagcccggcgacgttaagcttatctccgggcgaacgcgcgacgttatcttgccgcgcctctcagtctgtgtctagctcttatctggcctggtaccagcaaaaaccaggtcaggcgccgcgcctgttaatctacggcgcctcttctcgcgcgaccggcatcccggcgcgtttcagcggcagcggttctggcaccgatttcacgctgaccatctctcgcctggagccagaagactttgccgtgtattactgcgcctcttgggacgatagcctgaacggtcgcgtttttggtcagggcaccaaggttgagattaaa

SEQ ID NO: 479 - DNA, 765 bp, synthetic construct
  source 1..765: mol_type = other DNA
caggtgcagttagttgaaagcggcggtggtgtggtgcaaccgggtcgtagcttacgtttatcttgcgcggcctctggctttacctttagcagctatgcgatgcattgggtgcgtcaggcgccaggtaagggcttagagtgggtggcggttatctcttatgacggtagcaacaagtactacgccgatagcgttaaaggccgcttcacgattagccgcgacaacagcaaaaataccttatacttacagatgaattctttacgcgccgaggatacggccgtttattattgtgcccgtgagcgcttccaaacgatctcttataccacgggttttgacatttggggccagtggggtcaaggtaccctggtgaccgtttcttctggtggtagctctcgcagcagcagctctggcggcggtggcagcggcggtggcggcgagattgtgctgacccagagcccggcgacgttaagcttatctccgggcgaacgcgcgacgttatcttgccgcgcctctcagtctgtgtctagctcttatctggcctggtaccagcaaaaaccaggtcaggcgccgcgcctgttaatctacggcgcctcttctcgcgcgaccggcatcccggcgcgtttcagcggcagcggttctggcaccgatttcacgctgaccatctctcgcctggagccagaagactttgccgtgtattactgcggtacgtgggacagcagcctgtctgccggtggtgtgttcggccagggcacgaaggttgaaatcaaa

SEQ ID NO: 480 - DNA, 756 bp, synthetic construct
  source 1..756: mol_type = other DNA
caggtgcagttagttgaaagcggcggtggtgtggtgcaaccgggtcgtagcttacgtttatcttgcgcggcctctggctttacctttagcagctatgcgatgcattgggtgcgtcaggcgccaggtaagggcttagagtgggtggcggttatctcttatgacggtagcaacaagtactacgccgatagcgttaaaggccgcttcacgattagccgcgacaacagcaaaaataccttatacttacagatgaattctttacgcgccgaggatacggccgtttattattgtgcccgtgagcgcttccaaacgatctcttataccacgggttttgacatttggggccagtggggtcaaggtaccctggtgaccgtttcttctggtggtagctctcgcagcagcagctctggcggcggtggcagcggcggtggcggcgagattgtgctgacccagagcccggcgacgttaagcttatctccgggcgaacgcgcgacgttatcttgccgcgcctctcagtctgtgtctagctcttatctggcctggtaccagcaaaaaccaggtcaggcgccgcgcctgttaatctacggcgcctcttctcgcgcgaccggcatcccggcgcgtttcagcggcagcggttctggcaccgatttcacgctgaccatctctcgcctggagccagaagactttgccgtgtattactgccaacaagcctatagcccgccagttacgttcggccaaggcaccaaagttgagatcaaa

SEQ ID NO: 481 - DNA, 756 bp, synthetic construct
  source 1..756: mol_type = other DNA
caggtgcagttagttgaaagcggcggtggtgtggtgcaaccgggtcgtagcttacgtttatcttgcgcggcctctggctttacctttagcagctatgcgatgcattgggtgcgtcaggcgccaggtaagggcttagagtgggtggcggttatctcttatgacggtagcaacaagtactacgccgatagcgttaaaggccgcttcacgattagccgcgacaacagcaaaaataccttatacttacagatgaattctttacgcgccgaggatacggccgtttattattgtgcccgtgagcgcttccaaacgatctcttataccacgggttttgacatttggggccagtggggtcaaggtaccctggtgaccgtttcttctggtggtagctctcgcagcagcagctctggcggcggtggcagcggcggtggcggcgagattgtgctgacccagagcccggcgacgttaagcttatctccgggcgaacgcgcgacgttatcttgccgcgcctctcagtctgtgtctagctcttatctggcctggtaccagcaaaaaccaggtcaggcgccgcgcctgttaatctacggcgcctcttctcgcgcgaccggcatcccggcgcgtttcagcggcagcggttctggcaccgatttcacgctgaccatctctcgcctggagccagaagactttgccgtgtattactgccaacaagaggatagcccgccaatcacgttcggccaaggcaccaaagttgagatcaaa

SEQ ID NO: 482 - DNA, 756 bp, synthetic construct
  source 1..756: mol_type = other DNA
caggtgcagttagttgaaagcggcggtggtgtggtgcaaccgggtcgtagcttacgtttatcttgcgcggcctctggctttacctttagcagctatgcgatgcattgggtgcgtcaggcgccaggtaagggcttagagtgggtggcggttatctcttatgacggtagcaacaagtactacgccgatagcgttaaaggccgcttcacgattagccgcgacaacagcaaaaataccttatacttacagatgaattctttacgcgccgaggatacggccgtttattattgtgcccgtgagcgcttccaaacgatctcttataccacgggttttgacatttggggccagtggggtcaaggtaccctggtgaccgtttcttctggtggtagctctcgcagcagcagctctggcggcggtggcagcggcggtggcggcgagattgtgctgacccagagcccggcgacgttaagcttatctccgggcgaacgcgcgacgttatcttgccgcgcctctcagtctgtgtctagctcttatctggcctggtaccagcaaaaaccaggtcaggcgccgcgcctgttaatctacggcgcctcttctcgcgcgaccggcatcccggcgcgtttcagcggcagcggttctggcaccgatttcacgctgaccatctctcgcctggagccagaagactttgccgtgtattactgccaacaatctgatagcccgccaatcacgttcggccaaggcaccaaagttgagatcaaa

SEQ ID NO: 483 - DNA, 756 bp, synthetic construct
  source 1..756: mol_type = other DNA
caggtgcagttagttgaaagcggcggtggtgtggtgcaaccgggtcgtagcttacgtttatcttgcgcggcctctggctttacctttagcagctatgcgatgcattgggtgcgtcaggcgccaggtaagggcttagagtgggtggcggttatctcttatgacggtagcaacaagtactacgccgatagcgttaaaggccgcttcacgattagccgcgacaacagcaaaaataccttatacttacagatgaattctttacgcgccgaggatacggccgtttattattgtgcccgtgagcgcttccaaacgatctcttataccacgggttttgacatttggggccagtggggtcaaggtaccctggtgaccgtttcttctggtggtagctctcgcagcagcagctctggcggcggtggcagcggcggtggcggcgagattgtgctgacccagagcccggcgacgttaagcttatctccgggcgaacgcgcgacgttatcttgccgcgcctctcagtctgtgtctagctcttatctggcctggtaccagcaaaaaccaggtcaggcgccgcgcctgttaatctacggcgcctcttctcgcgcgaccggcatcccggcgcgtttcagcggcagcggttctggcaccgatttcacgctgaccatctctcgcctggagccagaagactttgccgtgtattactgccaacaatctaatagcccgccaatcacgttcggccaaggcaccaaagttgagatcaaa

SEQ ID NO: 484 - DNA, 756 bp, synthetic construct
  source 1..756: mol_type = other DNA
caggtgcagttagttgaaagcggcggtggtgtggtgcaaccgggtcgtagcttacgtttatcttgcgcggcctctggctttacctttagcagctatgcgatgcattgggtgcgtcaggcgccaggtaagggcttagagtgggtggcggttatctcttatgacggtagcaacaagtactacgccgatagcgttaaaggccgcttcacgattagccgcgacaacagcaaaaataccttatacttacagatgaattctttacgcgccgaggatacggccgtttattattgtgcccgtgagcgcttccaaacgatctcttataccacgggttttgacatttggggccagtggggtcaaggtaccctggtgaccgtttcttctggtggtagctctcgcagcagcagctctggcggcggtggcagcggcggtggcggcgagattgtgctgacccagagcccggcgacgttaagcttatctccgggcgaacgcgcgacgttatcttgccgcgcctctcagtctgtgtctagctcttatctggcctggtaccagcaaaaaccaggtcaggcgccgcgcctgttaatctacggcgcctcttctcgcgcgaccggcatcccggcgcgtttcagcggcagcggttctggcaccgatttcacgctgaccatctctcgcctggagccagaagactttgccgtgtattactgccaacaatcttatagcccgccaatcacgttcggccaaggcaccaaagttgagatcaaa

SEQ ID NO: 485 - DNA, 756 bp, synthetic construct
  source 1..756: mol_type = other DNA
caggtgcagttagttgaaagcggcggtggtgtggtgcaaccgggtcgtagcttacgtttatcttgcgcggcctctggctttacctttagcagctatgcgatgcattgggtgcgtcaggcgccaggtaagggcttagagtgggtggcggttatctcttatgacggtagcaacaagtactacgccgatagcgttaaaggccgcttcacgattagccgcgacaacagcaaaaataccttatacttacagatgaattctttacgcgccgaggatacggccgtttattattgtgcccgtgagcgcttccaaacgatctcttataccacgggttttgacatttggggccagtggggtcaaggtaccctggtgaccgtttcttctggtggtagctctcgcagcagcagctctggcggcggtggcagcggcggtggcggcgagattgtgctgacccagagcccggcgacgttaagcttatctccgggcgaacgcgcgacgttatcttgccgcgcctctcagtctgtgtctagctcttatctggcctggtaccagcaaaaaccaggtcaggcgccgcgcctgttaatctacggcgcctcttctcgcgcgaccggcatcccggcgcgtttcagcggcagcggttctggcaccgatttcacgctgaccatctctcgcctggagccagaagactttgccgtgtattactgccaacaatcttatagcccgccaccaacgttcggccaaggcaccaaagttgagatcaaa

SEQ ID NO: 486 - DNA, 756 bp, synthetic construct
  source 1..756: mol_type = other DNA
caggtgcagttagttgaaagcggcggtggtgtggtgcaaccgggtcgtagcttacgtttatcttgcgcggcctctggctttacctttagcagctatgcgatgcattgggtgcgtcaggcgccaggtaagggcttagagtgggtggcggttatctcttatgacggtagcaacaagtactacgccgatagcgttaaaggccgcttcacgattagccgcgacaacagcaaaaataccttatacttacagatgaattctttacgcgccgaggatacggccgtttattattgtgcccgtgagcgcttccaaacgatctcttataccacgggttttgacatttggggccagtggggtcaaggtaccctggtgaccgtttcttctggtggtagctctcgcagcagcagctctggcggcggtggcagcggcggtggcggcgagattgtgctgacccagagcccggcgacgttaagcttatctccgggcgaacgcgcgacgttatcttgccgcgcctctcagtctgtgtctagctcttatctggcctggtaccagcaaaaaccaggtcaggcgccgcgcctgttaatctacggcgcctcttctcgcgcgaccggcatcccggcgcgtttcagcggcagcggttctggcaccgatttcacgctgaccatctctcgcctggagccagaagactttgccgtgtattactgccaatcttacgatgataccggtccattattcggccaaggcaccaaagttgagatcaaa

SEQ ID NO: 487 - DNA, 747 bp, synthetic construct
  source 1..747: mol_type = other DNA
caggtgcagttagttgaaagcggcggtggtgtggtgcaaccgggtcgtagcttacgtttatcttgcgcggcctctggctttacctttagcagctatgcgatgcattgggtgcgtcaggcgccaggtaagggcttagagtgggtggcggttatctcttatgacggtagcaacaagtactacgccgatagcgttaaaggccgcttcacgattagccgcgacaacagcaaaaataccttatacttacagatgaattctttacgcgccgaggatacggccgtttattattgtgcccgtgagcgcggttctggtgagtacgcggtggactactggggccaatggggccagggcacgttagttaccgtgagcagcggtggttcttctcgcagctcttctagcggcggcggtggcagcggtggcggcggcgagattgtgttaacccagagcccggcgaccctgagcttatctccgggtgagcgtgcgaccttaagctgtcgcgccagccaatctgttagctctagctacctggcctggtatcagcaaaagccgggtcaggccccacgtctgctgatctatggtgcctctagccgcgccacgggtattccggcgcgctttagcggctctggcagcggcacggactttaccctgacgatcagccgtttagagccagaagacttcgcggtttattactgccagcaaagcgactctccaccgattaccttcggtcaaggtaccaaggtggaaattaaa

SEQ ID NO: 488 - DNA, 762 bp, synthetic construct
  source 1..762: mol_type = other DNA
caggtgcagttagttgaaagcggcggtggtgtggtgcaaccgggtcgtagcttacgtttatcttgcgcggcctctggctttacctttagcagctatgcgatgcattgggtgcgtcaggcgccaggtaagggcttagagtgggtggcggttatctcttatgacggtagcaacaagtactacgccgatagcgttaaaggccgcttcacgattagccgcgacaacagcaaaaataccttatacttacagatgaattctttacgcgccgaggatacggccgtttattattgtgcccgtgaggttggtcgcgcctctcgccattatttcatctatggtatggatgtgtggggccaatggggtcaaggcaccctggtgacggtttcttctggtggctcttctcgtagcagctctagcggcggtggcggcagcggtggcggcggtgaaattgtgctgacccagagcccggccacgctgtctttaagcccgggcgagcgtgccacgttaagctgtcgcgccagccaaagcgttagctctagctatttagcctggtatcaacagaagccaggccaggcgccacgtttattaatctatggtgcctcttctcgtgcgaccggtattccggcgcgctttagcggctctggtagcggcaccgacttcaccctgacgatctctcgtttagagccggaggatttcgcggtgtactattgtcaacaatattatagcccaccaatcacgtttggtcagggcaccaaggttgagattaaa

SEQ ID NO: 489 - DNA, 762 bp, synthetic construct
  source 1..762: mol_type = other DNA
caggtgcagttagttgaaagcggcggtggtgtggtgcaaccgggtcgtagcttacgtttatcttgcgcggcctctggctttacctttagcagctatgcgatgcattgggtgcgtcaggcgccaggtaagggcttagagtgggtggcggttatctcttatgacggtagcaacaagtactacgccgatagcgttaaaggccgcttcacgattagccgcgacaacagcaaaaataccttatacttacagatgaattctttacgcgccgaggatacggccgtttattattgtgcccgtgagtggcgcggtttcccatactactattatgcctcttggatggatccatggggccagtggggccaaggtacgctggtgaccgtgtcttctggtggttctagccgctctagcagcagcggtggcggcggtagcggcggcggtggcgaaatcgtgctgacccagagcccggcgaccttatctctgtctccaggcgaacgtgccaccttatcttgtcgtgcctctcaaagcgttagctctagctacctggcgtggtaccaacagaagccgggtcaagcgccgcgtttactgatctacggtgcgtcttctcgcgccaccggcattccagcgcgtttttctggcagcggctctggtaccgattttacgttaaccatttctcgcttagaaccagaggatttcgcggtttattattgtcaggcctgggactctagcacctatgttttcggtcaaggcacgaaagtggaaatcaaa

SEQ ID NO: 490 - DNA, 756 bp, synthetic construct
  source 1..756: mol_type = other DNA
caggtgcagttagttgaaagcggcggtggtgtggtgcaaccgggtcgtagcttacgtttatcttgcgcggcctctggctttacctttagcagctatgcgatgcattgggtgcgtcaggcgccaggtaagggcttagagtgggtggcggttatctcttatgacggtagcaacaagtactacgccgatagcgttaaaggccgcttcacgattagccgcgacaacagcaaaaataccttatacttacagatgaattctttacgcgccgaggatacggccgtttattattgtgcccgtttcggtcaagacacgttacgctatgcgtacggtatggatccatggggccagtggggccaaggtacgctggtgaccgtgtcttctggtggttctagccgctctagcagcagcggtggcggcggtagcggcggcggtggcgaaatcgtgctgacccagagcccggcgaccttatctctgtctccaggcgaacgtgccaccttatcttgtcgtgcctctcaaagcgttagctctagctacctggcgtggtaccaacagaagccgggtcaagcgccgcgtttactgatctacggtgcgtcttctcgcgccaccggcattccagcgcgtttttctggcagcggctctggtaccgattttacgttaaccatttctcgcttagaaccagaggatttcgcggtttattattgtcagcaatacgacaatctgccgatcacgttcggtcagggtaccaaagtggagatcaaa

SEQ ID NO: 491 - DNA, 756 bp, synthetic construct
  source 1..756: mol_type = other DNA
caggtgcagttagttgaaagcggcggtggtgtggtgcaaccgggtcgtagcttacgtttatcttgcgcggcctctggctttacctttagcagctatgcgatgcattgggtgcgtcaggcgccaggtaagggcttagagtgggtggcggttatctcttatgacggtagcaacaagtactacgccgatagcgttaaaggccgcttcacgattagccgcgacaacagcaaaaataccttatacttacagatgaattctttacgcgccgaggatacggccgtttattattgtgcccgtttcggtcaagacacgttacgctatgcgtacggtatggatccatggggccagtggggccaaggtacgctggtgaccgtgtcttctggtggttctagccgctctagcagcagcggtggcggcggtagcggcggcggtggcgaaatcgtgctgacccagagcccggcgaccttatctctgtctccaggcgaacgtgccaccttatcttgtcgtgcctctcaaagcgttagctctagctacctggcgtggtaccaacagaagccgggtcaagcgccgcgtttactgatctacggtgcgtcttctcgcgccaccggcattccagcgcgtttttctggcagcggctctggtaccgattttacgttaaccatttctcgcttagaaccagaggatttcgcggtttattattgtcagcaatacgacagcctgccgatcacgttcggtcagggtaccaaagtggagatcaaa

SEQ ID NO: 492 - DNA, 753 bp, synthetic construct
  source 1..753: mol_type = other DNA
caggtgcagttagttgaaagcggcggtggtgtggtgcaaccgggtcgtagcttacgtttatcttgcgcggcctctggctttacctttagcagctatgcgatgcattgggtgcgtcaggcgccaggtaagggcttagagtgggtggcggttatctcttatgacggtagcaacaagtactacgccgatagcgttaaaggccgcttcacgattagccgcgacaacagcaaaaataccttatacttacagatgaattctttacgcgccgaggatacggccgtttattattgtgcccgtttctctggtcgctacaacggtgattttgactactggggccaatggggccagggcacgttagttaccgtgagcagcggtggttcttctcgcagctcttctagcggcggcggtggcagcggtggcggcggcgagattgtgttaacccagagcccggcgaccctgagcttatctccgggtgagcgtgcgaccttaagctgtcgcgccagccaatctgttagctctagctacctggcctggtatcagcaaaagccgggtcaggccccacgtctgctgatctatggtgcctctagccgcgccacgggtattccggcgcgctttagcggctctggcagcggcacggactttaccctgacgatcagccgtttagagccagaagacttcgcggtttattactgccaggtttgggattctggttctctgcatccggttttcggtcaaggcacgaaagtggaaatcaaa

SEQ ID NO: 493 - DNA, 753 bp, synthetic construct
  source 1..753: mol_type = other DNA
caggtgcagttagttgaaagcggcggtggtgtggtgcaaccgggtcgtagcttacgtttatcttgcgcggcctctggctttacctttagcagctatgcgatgcattgggtgcgtcaggcgccaggtaagggcttagagtgggtggcggttatctcttatgacggtagcaacaagtactacgccgatagcgttaaaggccgcttcacgattagccgcgacaacagcaaaaataccttatacttacagatgaattctttacgcgccgaggatacggccgtttattattgtgcccgtttctacggtcgcgttggttactattatggtatggacgtgtggggtcagtggggccagggtacgttagtgaccgtgagctctggtggttcttctcgttcttctagcagcggcggtggcggctctggcggcggcggtgaaattgttctgacccagagcccggcgaccctgtctttaagcccaggtgaacgtgcgacgctgtcttgtcgcgcgtctcaatctgtgtctagctcttatttagcgtggtatcaacaaaaaccaggccaagccccgcgtctgttaatttacggtgccagctctcgcgccacgggcattccggcccgttttagcggtagcggcagcggtacggattttaccttaacgattagccgcttagagccggaggactttgccgtgtactattgccaacagtacgacttaccgccgatttctttcggtcaaggcacgaaagtggaaatcaaa

SEQ ID NO: 494 - DNA, 738 bp, synthetic construct
  source 1..738: mol_type = other DNA
caggtgcagttagttgaaagcggcggtggtgtggtgcaaccgggtcgtagcttacgtttatcttgcgcggcctctggctttacctttagcagctatgcgatgcattgggtgcgtcaggcgccaggtaagggcttagagtgggtggcggttatctcttatgacggtagcaacaagtactacgccgatagcgttaaaggccgcttcacgattagccgcgacaacagcaaaaataccttatacttacagatgaattctttacgcgccgaggatacggccgtttattattgtgcccgtggtgccgacttaacgtactggggtcagtggggccaaggtaccttagtgaccgtgtcttctggtggcagcagccgttcttcttcttctggtggcggtggtagcggcggcggtggcgaaatcgtgctgacccaaagcccggccaccctgagcctgagcccgggcgaacgcgccaccttatcttgccgtgcgtctcagtctgtttctagctcttacttagcgtggtaccagcaaaaaccaggccaggccccacgtttactgatctacggcgcgagctctcgtgccacgggtattccagcccgcttcagcggcagcggtagcggcaccgactttaccctgacgatcagccgtctggagccagaagatttcgccgtttattactgtcagcaatatggtagcagctctccgggttactcttttggccagggtacgaaggttgaaatcaaa

SEQ ID NO: 495 - DNA, 759 bp, synthetic construct
  source 1..759: mol_type = other DNA
caggtgcagttagttgaaagcggcggtggtgtggtgcaaccgggtcgtagcttacgtttatcttgcgcggcctctggctttacctttagcagctatgcgatgcattgggtgcgtcaggcgccaggtaagggcttagagtgggtggcggttatctcttatgacggtagcaacaagtactacgccgatagcgttaaaggccgcttcacgattagccgcgacaacagcaaaaataccttatacttacagatgaattctttacgcgccgaggatacggccgtttattattgtgcccgtggtgcctcttcttcttactgggagccggataactactggggccaatggggccagggcacgttagttaccgtgagcagcggtggttcttctcgcagctcttctagcggcggcggtggcagcggtggcggcggcgagattgtgttaacccagagcccggcgaccctgagcttatctccgggtgagcgtgcgaccttaagctgtcgcgccagccaatctgttagctctagctacctggcctggtatcagcaaaagccgggtcaggccccacgtctgctgatctatggtgcctctagccgcgccacgggtattccggcgcgctttagcggctctggcagcggcacggactttaccctgacgatcagccgtttagagccagaagacttcgcggtttattactgcgcggcctgggattcttctttaaatctgctgtacgttttcggtcagggtaccaaagtggagatcaaa

SEQ ID NO: 496 - DNA, 750 bp, synthetic construct
  source 1..750: mol_type = other DNA
caggtgcagttagttgaaagcggcggtggtgtggtgcaaccgggtcgtagcttacgtttatcttgcgcggcctctggctttacctttagcagctatgcgatgcattgggtgcgtcaggcgccaggtaagggcttagagtgggtggcggttatctcttatgacggtagcaacaagtactacgccgatagcgttaaaggccgcttcacgattagccgcgacaacagcaaaaataccttatacttacagatgaattctttacgcgccgaggatacggccgtttattattgtgcccgtggtgcctaccgccgcgttccaaaaatgtttgacatctggggccaatggggccagggcacgttagttaccgtgagcagcggtggttcttctcgcagctcttctagcggcggcggtggcagcggtggcggcggcgagattgtgttaacccagagcccggcgaccctgagcttatctccgggtgagcgtgcgaccttaagctgtcgcgccagccaatctgttagctctagctacctggcctggtatcagcaaaagccgggtcaggccccacgtctgctgatctatggtgcctctagccgcgccacgggtattccggcgcgctttagcggctctggcagcggcacggactttaccctgacgatcagccgtttagagccagaagacttcgcggtttattactgccagcaatattactctgccccgtataccttcggtcaaggtaccaaggtggaaattaaa

SEQ ID NO: 497 - DNA, 750 bp, synthetic construct
  source 1..750: mol_type = other DNA
caggtgcagttagttgaaagcggcggtggtgtggtgcaaccgggtcgtagcttacgtttatcttgcgcggcctctggctttacctttagcagctatgcgatgcattgggtgcgtcaggcgccaggtaagggcttagagtgggtggcggttatctcttatgacggtagcaacaagtactacgccgatagcgttaaaggccgcttcacgattagccgcgacaacagcaaaaataccttatacttacagatgaattctttacgcgccgaggatacggccgtttattattgtgcccgtggtgcctaccgccgcgttccaaaaatgtttgacatctggggccaatggggccagggcacgttagttaccgtgagcagcggtggttcttctcgcagctcttctagcggcggcggtggcagcggtggcggcggcgagattgtgttaacccagagcccggcgaccctgagcttatctccgggtgagcgtgcgaccttaagctgtcgcgccagccaatctgttagctctagctacctggcctggtatcagcaaaagccgggtcaggccccacgtctgctgatctatggtgcctctagccgcgccacgggtattccggcgcgctttagcggctctggcagcggcacggactttaccctgacgatcagccgtttagagccagaagacttcgcggtttattactgccagcaatattactctccaccgcataccttcggtcaaggtaccaaggtggaaattaaa

SEQ ID NO: 498 - DNA, 741 bp, synthetic construct
  source 1..741: mol_type = other DNA
caggtgcagttagttgaaagcggcggtggtgtggtgcaaccgggtcgtagcttacgtttatcttgcgcggcctctggctttacctttagcagctatgcgatgcattgggtgcgtcaggcgccaggtaagggcttagagtgggtggcggttatctcttatgacggtagcaacaagtactacgccgatagcgttaaaggccgcttcacgattagccgcgacaacagcaaaaataccttatacttacagatgaattctttacgcgccgaggatacggccgtttattattgtgcccgtggtgactacaacgccttcgaccgttggggccaatggggtcagggtaccctggtgacggtttctagcggcggcagctctcgctcttcttctagcggtggtggcggcagcggtggcggcggtgaaattgtgttaacccagtctccggcgaccctgagcctgagcccgggtgagcgtgccacgctgagctgccgcgcgtctcaatctgtgtcttcttcttatttagcgtggtaccagcaaaaaccgggtcaagcgccacgtttattaatttatggcgccagctctcgcgccaccggtatcccagcccgttttagcggtagcggcagcggtaccgattttacgttaaccattagccgcttagaaccggaggacttcgcggtttactattgtgaaacgtgggatagcttcaatcacttagtttttggccagggtacgaaggttgaaatcaaa

SEQ ID NO: 499 - DNA, 765 bp, synthetic construct
  source 1..765: mol_type = other DNA
caggtgcagttagttgaaagcggcggtggtgtggtgcaaccgggtcgtagcttacgtttatcttgcgcggcctctggctttacctttagcagctatgcgatgcattgggtgcgtcaggcgccaggtaagggcttagagtgggtggcggttatctcttatgacggtagcaacaagtactacgccgatagcgttaaaggccgcttcacgattagccgcgacaacagcaaaaataccttatacttacagatgaattctttacgcgccgaggatacggccgtttattattgtgcccgtggtgactaccgcgttacgggtagcaccacgtactttgaccattggggccagtggggtcaaggtaccctggtgaccgtttcttctggtggtagctctcgcagcagcagctctggcggcggtggcagcggcggtggcggcgagattgtgctgacccagagcccggcgacgttaagcttatctccgggcgaacgcgcgacgttatcttgccgcgcctctcagtctgtgtctagctcttatctggcctggtaccagcaaaaaccaggtcaggcgccgcgcctgttaatctacggcgcctcttctcgcgcgaccggcatcccggcgcgtttcagcggcagcggttctggcaccgatttcacgctgaccatctctcgcctggagccagaagactttgccgtgtattactgccaatcttacgatagcagcttatctggtggtggcgtttttggccagggtacgaaggtggagatcaaa

SEQ ID NO: 500 - DNA, 735 bp, synthetic construct
  source 1..735: mol_type = other DNA
caggtgcagttagttgaaagcggcggtggtgtggtgcaaccgggtcgtagcttacgtttatcttgcgcggcctctggctttacctttagcagctatgcgatgcattgggtgcgtcaggcgccaggtaagggcttagagtgggtggcggttatctcttatgacggtagcaacaagtactacgccgatagcgttaaaggccgcttcacgattagccgcgacaacagcaaaaataccttatacttacagatgaattctttacgcgccgaggatacggccgtttattattgtgcccgtggtggttctccatctgaccactggggccagtggggtcaaggcacgctggtgaccgtttcttctggcggcagcagccgctcttcttcttctggcggtggtggcagcggcggtggcggcgagattgtgctgacgcagagcccagcgaccctgagcctgagcccgggcgagcgcgcgacgttaagctgccgtgccagccaatctgttagctcttcttacctggcctggtatcaacagaagccgggccaagccccgcgcctgttaatctatggcgcgtctagccgcgccacgggcatcccagcccgctttagcggctctggcagcggcacggattttaccttaacgattagccgtttagagccggaagacttcgccgtgtactactgccaacagtactatgatggtcgtcgcacgttcggccagggcacgaaggttgagattaaa

SEQ ID NO: 501 - DNA, 756 bp, synthetic construct
  source 1..756: mol_type = other DNA
caggtgcagttagttgaaagcggcggtggtgtggtgcaaccgggtcgtagcttacgtttatcttgcgcggcctctggctttacctttagcagctatgcgatgcattgggtgcgtcaggcgccaggtaagggcttagagtgggtggcggttatctcttatgacggtagcaacaagtactacgccgatagcgttaaaggccgcttcacgattagccgcgacaacagcaaaaataccttatacttacagatgaattctttacgcgccgaggatacggccgtttattattgtgcccgtggtggttactcttcttcttactattggtatggtatggacctgtggggtcagtggggccagggtacgttagtgaccgtgagctctggtggttcttctcgttcttctagcagcggcggtggcggctctggcggcggcggtgaaattgttctgacccagagcccggcgaccctgtctttaagcccaggtgaacgtgcgacgctgtcttgtcgcgcgtctcaatctgtgtctagctcttatttagcgtggtatcaacaaaaaccaggccaagccccgcgtctgttaatttacggtgccagctctcgcgccacgggcattccggcccgttttagcggtagcggcagcggtacggattttaccttaacgattagccgcttagagccggaggactttgccgtgtactattgccaacaggccttacaagcgccgattacgttcggtcaaggcacgaaagtggaaatcaaa

SEQ ID NO: 502 - DNA, 741 bp, synthetic construct
  source 1..741: mol_type = other DNA
caggtgcagttagttgaaagcggcggtggtgtggtgcaaccgggtcgtagcttacgtttatcttgcgcggcctctggctttacctttagcagctatgcgatgcattgggtgcgtcaggcgccaggtaagggcttagagtgggtggcggttatctcttatgacggtagcaacaagtactacgccgatagcgttaaaggccgcttcacgattagccgcgacaacagcaaaaataccttatacttacagatgaattctttacgcgccgaggatacggccgtttattattgtgcccgtggtaaggcctggggttggttcgacccatggggccagtggggtcaaggcacgctggtgaccgtttcttctggcggcagcagccgctcttcttcttctggcggtggtggcagcggcggtggcggcgagattgtgctgacgcagagcccagcgaccctgagcctgagcccgggcgagcgcgcgacgttaagctgccgtgccagccaatctgttagctcttcttacctggcctggtatcaacagaagccgggccaagccccgcgcctgttaatctatggcgcgtctagccgcgccacgggcatcccagcccgctttagcggctctggcagcggcacggattttaccttaacgattagccgtttagagccggaagacttcgccgtgtactactgccaacagttcgatagcatcccgtggacgttcggtcagggcaccaaggttgagatcaaa

SEQ ID NO: 503 - DNA, 741 bp, synthetic construct
  source 1..741: mol_type = other DNA
caggtgcagttagttgaaagcggcggtggtgtggtgcaaccgggtcgtagcttacgtttatcttgcgcggcctctggctttacctttagcagctatgcgatgcattgggtgcgtcaggcgccaggtaagggcttagagtgggtggcggttatctcttatgacggtagcaacaagtactacgccgatagcgttaaaggccgcttcacgattagccgcgacaacagcaaaaataccttatacttacagatgaattctttacgcgccgaggatacggccgtttattattgtgcccgtggtaaggcctggggttggttcgacccatggggccagtggggtcaaggcacgctggtgaccgtttcttctggcggcagcagccgctcttcttcttctggcggtggtggcagcggcggtggcggcgagattgtgctgacgcagagcccagcgaccctgagcctgagcccgggcgagcgcgcgacgttaagctgccgtgccagccaatctgttagctcttcttacctggcctggtatcaacagaagccgggccaagccccgcgcctgttaatctatggcgcgtctagccgcgccacgggcatcccagcccgctttagcggctctggcagcggcacggattttaccttaacgattagccgtttagagccggaagacttcgccgtgtactactgccaacagtactatagcttcccgtggacgttcggtcagggcaccaaggttgagatcaaa

SEQ ID NO: 504 - DNA, 759 bp, synthetic construct
  source 1..759: mol_type = other DNA
caggtgcagttagttgaaagcggcggtggtgtggtgcaaccgggtcgtagcttacgtttatcttgcgcggcctctggctttacctttagcagctatgcgatgcattgggtgcgtcaggcgccaggtaagggcttagagtgggtggcggttatctcttatgacggtagcaacaagtactacgccgatagcgttaaaggccgcttcacgattagccgcgacaacagcaaaaataccttatacttacagatgaattctttacgcgccgaggatacggccgtttattattgtgcccgtggtaagcgcgcctctggtgacgcgtttggtccatggggccaatggggccagggcacgttagttaccgtgagcagcggtggttcttctcgcagctcttctagcggcggcggtggcagcggtggcggcggcgagattgtgttaacccagagcccggcgaccctgagcttatctccgggtgagcgtgcgaccttaagctgtcgcgccagccaatctgttagctctagctacctggcctggtatcagcaaaagccgggtcaggccccacgtctgctgatctatggtgcctctagccgcgccacgggtattccggcgcgctttagcggctctggcagcggcacggactttaccctgacgatcagccgtttagagccagaagacttcgcggtttattactgcggcacgtgggattcttctttaagcggcctgtcttacgttttcggccaaggcaccaaagttgagatcaaa

SEQ ID NO: 505 - DNA, 774 bp, synthetic construct
  source 1..774: mol_type = other DNA
caggtgcagttagttgaaagcggcggtggtgtggtgcaaccgggtcgtagcttacgtttatcttgcgcggcctctggctttacctttagcagctatgcgatgcattgggtgcgtcaggcgccaggtaagggcttagagtgggtggcggttatctcttatgacggtagcaacaagtactacgccgatagcgttaaaggccgcttcacgattagccgcgacaacagcaaaaataccttatacttacagatgaattctttacgcgccgaggatacggccgtttattattgtgcccgtggtttacgcggttaccgcggtggcggcacgtacgatgcctttgatgtgtggggtcaatggggtcagggcaccctggttacggtttcttctggcggttctagccgtagctctagcagcggtggcggcggctctggcggcggtggcgaaattgtgctgacccagagcccagccaccttatctctgagcccgggtgaacgcgccacgctgtcttgtcgcgcgtctcagtctgtgtctagcagctacttagcgtggtaccagcaaaagccgggccaggccccgcgcttattaatttacggtgcctctagccgtgcgacgggcattccggcccgttttagcggttctggcagcggcacggactttaccttaacgatcagccgcttagaaccagaagactttgcggtttattactgtggtacctgggatagctctttatctgaccagggttgggtgtttggccaaggtacgaaagttgagattaaa

SEQ ID NO: 506 - DNA, 771 bp, synthetic construct
  source 1..771: mol_type = other DNA
caggtgcagttagttgaaagcggcggtggtgtggtgcaaccgggtcgtagcttacgtttatcttgcgcggcctctggctttacctttagcagctatgcgatgcattgggtgcgtcaggcgccaggtaagggcttagagtgggtggcggttatctcttatgacggtagcaacaagtactacgccgatagcgttaaaggccgcttcacgattagccgcgacaacagcaaaaataccttatacttacagatgaattctttacgcgccgaggatacggccgtttattattgtgcccgtggtttacgcggttaccgcggtggcggcacgtacgatgcctttgatgtgtggggtcaatggggtcagggcaccctggttacggtttcttctggcggttctagccgtagctctagcagcggtggcggcggctctggcggcggtggcgaaattgtgctgacccagagcccagccaccttatctctgagcccgggtgaacgcgccacgctgtcttgtcgcgcgtctcagtctgtgtctagcagctacttagcgtggtaccagcaaaagccgggccaggccccgcgcttattaatttacggtgcctctagccgtgcgacgggcattccggcccgttttagcggttctggcagcggcacggactttaccttaacgatcagccgcttagaaccagaagactttgcggtttattactgtggtacctgggatagctcttcttctccacgttgggtttttggccagggtacgaaggtggagatcaaa

SEQ ID NO: 507 - DNA, 762 bp, synthetic construct
  source 1..762: mol_type = other DNA
caggtgcagttagttgaaagcggcggtggtgtggtgcaaccgggtcgtagcttacgtttatcttgcgcggcctctggctttacctttagcagctatgcgatgcattgggtgcgtcaggcgccaggtaagggcttagagtgggtggcggttatctcttatgacggtagcaacaagtactacgccgatagcgttaaaggccgcttcacgattagccgcgacaacagcaaaaataccttatacttacagatgaattctttacgcgccgaggatacggccgtttattattgtgcccgtggtttacgcggttaccgcggtggcggcacgtacgatgcctttgatgtgtggggtcaatggggtcagggcaccctggttacggtttcttctggcggttctagccgtagctctagcagcggtggcggcggctctggcggcggtggcgaaattgtgctgacccagagcccagccaccttatctctgagcccgggtgaacgcgccacgctgtcttgtcgcgcgtctcagtctgtgtctagcagctacttagcgtggtaccagcaaaagccgggccaggccccgcgcttattaatttacggtgcctctagccgtgcgacgggcattccggcccgttttagcggttctggcagcggcacggactttaccttaacgatcagccgcttagaaccagaagactttgcggtttattactgtcaacagaccagcgacttcccatacaccttcggccagggcacgaaggttgaaatcaaa

SEQ ID NO: 508 - DNA, 762 bp, synthetic construct
  source 1..762: mol_type = other DNA
caggtgcagttagttgaaagcggcggtggtgtggtgcaaccgggtcgtagcttacgtttatcttgcgcggcctctggctttacctttagcagctatgcgatgcattgggtgcgtcaggcgccaggtaagggcttagagtgggtggcggttatctcttatgacggtagcaacaagtactacgccgatagcgttaaaggccgcttcacgattagccgcgacaacagcaaaaataccttatacttacagatgaattctttacgcgccgaggatacggccgtttattattgtgcccgtggtttacgcggttaccgcggtggcggcacgtacgatgcctttgatgtgtggggtcaatggggtcagggcaccctggttacggtttcttctggcggttctagccgtagctctagcagcggtggcggcggctctggcggcggtggcgaaattgtgctgacccagagcccagccaccttatctctgagcccgggtgaacgcgccacgctgtcttgtcgcgcgtctcagtctgtgtctagcagctacttagcgtggtaccagcaaaagccgggccaggccccgcgcttattaatttacggtgcctctagccgtgcgacgggcattccggcccgttttagcggttctggcagcggcacggactttaccttaacgatcagccgcttagaaccagaagactttgcggtttattactgtcaacagtataattcttactcttggacgtttggtcagggcaccaaggttgagattaaa

SEQ ID NO: 509 - DNA, 753 bp, synthetic construct
  source 1..753: mol_type = other DNA
caggtgcagttagttgaaagcggcggtggtgtggtgcaaccgggtcgtagcttacgtttatcttgcgcggcctctggctttacctttagcagctatgcgatgcattgggtgcgtcaggcgccaggtaagggcttagagtgggtggcggttatctcttatgacggtagcaacaagtactacgccgatagcgttaaaggccgcttcacgattagccgcgacaacagcaaaaataccttatacttacagatgaattctttacgcgccgaggatacggccgtttattattgtgcccgtggtttataccgcggtttcggtgtgggcttcgacatttggggtcagtggggccagggtacgttagtgaccgtgagctctggtggttcttctcgttcttctagcagcggcggtggcggctctggcggcggcggtgaaattgttctgacccagagcccggcgaccctgtctttaagcccaggtgaacgtgcgacgctgtcttgtcgcgcgtctcaatctgtgtctagctcttatttagcgtggtatcaacaaaaaccaggccaagccccgcgtctgttaatttacggtgccagctctcgcgccacgggcattccggcccgttttagcggtagcggcagcggtacggattttaccttaacgattagccgcttagagccggaggactttgccgtgtactattgccaacagtacaactcttatagcccggttacgttcggtcagggtaccaaagtggagatcaaa

SEQ ID NO: 510 - DNA, 759 bp, synthetic construct
  source 1..759: mol_type = other DNA
caggtgcagttagttgaaagcggcggtggtgtggtgcaaccgggtcgtagcttacgtttatcttgcgcggcctctggctttacctttagcagctatgcgatgcattgggtgcgtcaggcgccaggtaagggcttagagtgggtggcggttatctcttatgacggtagcaacaagtactacgccgatagcgttaaaggccgcttcacgattagccgcgacaacagcaaaaataccttatacttacagatgaattctttacgcgccgaggatacggccgtttattattgtgcccgtggtccaggtggtatgtctggttggatcggctattggggtcaatggggccaaggcaccctggttacggttagcagcggcggctcttctcgctcttctagctctggtggcggcggctctggcggcggtggcgaaattgttctgacccaaagcccggcgaccctgagcctgagcccaggtgaacgcgccaccctgagctgtcgtgcctctcaaagcgtttcttctagctacctggcctggtatcaacagaaaccaggtcaggccccgcgcttactgatttatggtgcgtcttctcgcgcgacgggtatcccagcgcgtttttctggcagcggctctggcaccgatttcacgctgaccatttctcgcctggaaccagaggactttgccgtttattactgcggtacctgggattctagcttatcttctctggattatgttttcggtcaaggcacgaaagtggaaatcaaa

SEQ ID NO: 511 - DNA, 756 bp, synthetic construct
  source 1..756: mol_type = other DNA
caggtgcagttagttgaaagcggcggtggtgtggtgcaaccgggtcgtagcttacgtttatcttgcgcggcctctggctttacctttagcagctatgcgatgcattgggtgcgtcaggcgccaggtaagggcttagagtgggtggcggttatctcttatgacggtagcaacaagtactacgccgatagcgttaaaggccgcttcacgattagccgcgacaacagcaaaaataccttatacttacagatgaattctttacgcgccgaggatacggccgtttattattgtgcccgtggtccataccgccgctcttactttagctacggtatggatgtttggggccagtggggccaaggtacgctggtgaccgtgtcttctggtggttctagccgctctagcagcagcggtggcggcggtagcggcggcggtggcgaaatcgtgctgacccagagcccggcgaccttatctctgtctccaggcgaacgtgccaccttatcttgtcgtgcctctcaaagcgttagctctagctacctggcgtggtaccaacagaagccgggtcaagcgccgcgtttactgatctacggtgcgtcttctcgcgccaccggcattccagcgcgtttttctggcagcggctctggtaccgattttacgttaaccatttctcgcttagaaccagaggatttcgcggtttattattgtggcacgtggggttctaccggcattgttttcggtcaaggcacgaaagtggaaatcaaa

SEQ ID NO: 512 - DNA, 756 bp, synthetic construct
  source 1..756: mol_type = other DNA
caggtgcagttagttgaaagcggcggtggtgtggtgcaaccgggtcgtagcttacgtttatcttgcgcggcctctggctttacctttagcagctatgcgatgcattgggtgcgtcaggcgccaggtaagggcttagagtgggtggcggttatctcttatgacggtagcaacaagtactacgccgatagcgttaaaggccgcttcacgattagccgcgacaacagcaaaaataccttatacttacagatgaattctttacgcgccgaggatacggccgtttattattgtgcccgtggtccataccgccgctcttactttagctacggtatggatgtttggggccagtggggccaaggtacgctggtgaccgtgtcttctggtggttctagccgctctagcagcagcggtggcggcggtagcggcggcggtggcgaaatcgtgctgacccagagcccggcgaccttatctctgtctccaggcgaacgtgccaccttatcttgtcgtgcctctcaaagcgttagctctagctacctggcgtggtaccaacagaagccgggtcaagcgccgcgtttactgatctacggtgcgtcttctcgcgccaccggcattccagcgcgtttttctggcagcggctctggtaccgattttacgttaaccatttctcgcttagaaccagaggatttcgcggtttattattgtcagcaagaggacaatctgccgccaacgttcggtcagggtaccaaagtggagatcaaa

SEQ ID NO: 513 - DNA, 741 bp, synthetic construct
  source 1..741: mol_type = other DNA
caggtgcagttagttgaaagcggcggtggtgtggtgcaaccgggtcgtagcttacgtttatcttgcgcggcctctggctttacctttagcagctatgcgatgcattgggtgcgtcaggcgccaggtaagggcttagagtgggtggcggttatctcttatgacggtagcaacaagtactacgccgatagcgttaaaggccgcttcacgattagccgcgacaacagcaaaaataccttatacttacagatgaattctttacgcgccgaggatacggccgtttattattgtgcccgtggtcaaggtccatacttaccatattggggccaatggggtcagggtaccctggtgacggtttctagcggcggcagctctcgctcttcttctagcggtggtggcggcagcggtggcggcggtgaaattgtgttaacccagtctccggcgaccctgagcctgagcccgggtgagcgtgccacgctgagctgccgcgcgtctcaatctgtgtcttcttcttatttagcgtggtaccagcaaaaaccgggtcaagcgccacgtttattaatttatggcgccagctctcgcgccaccggtatcccagcccgttttagcggtagcggcagcggtaccgattttacgttaaccattagccgcttagaaccggaggacttcgcggtttactattgtcaggcctgggatagcacgccgaaggttgtttttggccagggtacgaaggttgaaatcaaa

SEQ ID NO: 514 - DNA, 765 bp, synthetic construct
  source 1..765: mol_type = other DNA
caggtgcagttagttgaaagcggcggtggtgtggtgcaaccgggtcgtagcttacgtttatcttgcgcggcctctggctttacctttagcagctatgcgatgcattgggtgcgtcaggcgccaggtaagggcttagagtgggtggcggttatctcttatgacggtagcaacaagtactacgccgatagcgttaaaggccgcttcacgattagccgcgacaacagcaaaaataccttatacttacagatgaattctttacgcgccgaggatacggccgtttattattgtgcccgtggtcgcgcctaccgctctgccccggcggcctactggatggatatctggggccagtggggccaaggtacgctggtgaccgtgtcttctggtggttctagccgctctagcagcagcggtggcggcggtagcggcggcggtggcgaaatcgtgctgacccagagcccggcgaccttatctctgtctccaggcgaacgtgccaccttatcttgtcgtgcctctcaaagcgttagctctagctacctggcgtggtaccaacagaagccgggtcaagcgccgcgtttactgatctacggtgcgtcttctcgcgccaccggcattccagcgcgtttttctggcagcggctctggtaccgattttacgttaaccatttctcgcttagaaccagaggatttcgcggtttattattgtggcacgtgggactctagcctgaatgttgttgttttcggccaaggcaccaaagttgagatcaaa

SEQ ID NO: 515 - DNA, 762 bp, synthetic construct
  source 1..762: mol_type = other DNA
caggtgcagttagttgaaagcggcggtggtgtggtgcaaccgggtcgtagcttacgtttatcttgcgcggcctctggctttacctttagcagctatgcgatgcattgggtgcgtcaggcgccaggtaagggcttagagtgggtggcggttatctcttatgacggtagcaacaagtactacgccgatagcgttaaaggccgcttcacgattagccgcgacaacagcaaaaataccttatacttacagatgaattctttacgcgccgaggatacggccgtttattattgtgcccgtggtcgcggtatctactactctggcggctctcgcagcttatggggccagtggggccaaggtacgctggtgaccgtgtcttctggtggttctagccgctctagcagcagcggtggcggcggtagcggcggcggtggcgaaatcgtgctgacccagagcccggcgaccttatctctgtctccaggcgaacgtgccaccttatcttgtcgtgcctctcaaagcgttagctctagctacctggcgtggtaccaacagaagccgggtcaagcgccgcgtttactgatctacggtgcgtcttctcgcgccaccggcattccagcgcgtttttctggcagcggctctggtaccgattttacgttaaccatttctcgcttagaaccagaggatttcgcggtttattattgtggcacgtgggactctagcctgggcgccgcctggatcttcggccaaggcaccaaagttgagatcaaa

SEQ ID NO: 516 - DNA, 747 bp, synthetic construct
  source 1..747: mol_type = other DNA
caggtgcagttagttgaaagcggcggtggtgtggtgcaaccgggtcgtagcttacgtttatcttgcgcggcctctggctttacctttagcagctatgcgatgcattgggtgcgtcaggcgccaggtaagggcttagagtgggtggcggttatctcttatgacggtagcaacaagtactacgccgatagcgttaaaggccgcttcacgattagccgcgacaacagcaaaaataccttatacttacagatgaattctttacgcgccgaggatacggccgtttattattgtgcccgtggtcgcggtgttatcgttgactattggggccaatggggtcagggtaccctggtgacggtttctagcggcggcagctctcgctcttcttctagcggtggtggcggcagcggtggcggcggtgaaattgtgttaacccagtctccggcgaccctgagcctgagcccgggtgagcgtgccacgctgagctgccgcgcgtctcaatctgtgtcttcttcttatttagcgtggtaccagcaaaaaccgggtcaagcgccacgtttattaatttatggcgccagctctcgcgccaccggtatcccagcccgttttagcggtagcggcagcggtaccgattttacgttaaccattagccgcttagaaccggaggacttcgcggtttactattgtaattcttgggatagccgcggcggtcacttagtggtgtttggtcaaggtacgaaagttgaaattaaa

SEQ ID NO: 517 - DNA, 741 bp, synthetic construct
  source 1..741: mol_type = other DNA
caggtgcagttagttgaaagcggcggtggtgtggtgcaaccgggtcgtagcttacgtttatcttgcgcggcctctggctttacctttagcagctatgcgatgcattgggtgcgtcaggcgccaggtaagggcttagagtgggtggcggttatctcttatgacggtagcaacaagtactacgccgatagcgttaaaggccgcttcacgattagccgcgacaacagcaaaaataccttatacttacagatgaattctttacgcgccgaggatacggccgtttattattgtgcccgtggtcgcggtgttatcgttgactattggggccaatggggtcagggtaccctggtgacggtttctagcggcggcagctctcgctcttcttctagcggtggtggcggcagcggtggcggcggtgaaattgtgttaacccagtctccggcgaccctgagcctgagcccgggtgagcgtgccacgctgagctgccgcgcgtctcaatctgtgtcttcttcttatttagcgtggtaccagcaaaaaccgggtcaagcgccacgtttattaatttatggcgccagctctcgcgccaccggtatcccagcccgttttagcggtagcggcagcggtaccgattttacgttaaccattagccgcttagaaccggaggacttcgcggtttactattgtcaggcctgggatagctctccgtctgttgtttttggccagggtacgaaggttgaaatcaaa

SEQ ID NO: 518 - DNA, 759 bp, synthetic construct
  source 1..759: mol_type = other DNA
caggtgcagttagttgaaagcggcggtggtgtggtgcaaccgggtcgtagcttacgtttatcttgcgcggcctctggctttacctttagcagctatgcgatgcattgggtgcgtcaggcgccaggtaagggcttagagtgggtggcggttatctcttatgacggtagcaacaagtactacgccgatagcgttaaaggccgcttcacgattagccgcgacaacagcaaaaataccttatacttacagatgaattctttacgcgccgaggatacggccgtttattattgtgcccgtggtcgcggtgtttcttactacggcctggacatgtggggtcagtggggtcagggcaccttagttacggtgagcagcggcggttcttctcgctctagctcttctggcggcggcggtagcggcggtggcggcgaaatcgtgctgacgcagagcccggcgaccctgagcctgtctccaggcgagcgcgcgaccctgtcttgccgcgcctctcagtctgtttctagctcttatttagcgtggtaccagcagaagccaggccaagcgccacgcctgctgatttacggcgcctcttctcgtgccacgggtatcccggcgcgtttcagcggcagcggtagcggcaccgacttcaccctgaccatctctcgtctggagccagaggatttcgccgtgtactattgtggcacctgggacagctctttatctagcctggattacgttttcggtcagggtaccaaagtggagatcaaa

SEQ ID NO: 519 - DNA, 747 bp, synthetic construct
  source 1..747: mol_type = other DNA
caggtgcagttagttgaaagcggcggtggtgtggtgcaaccgggtcgtagcttacgtttatcttgcgcggcctctggctttacctttagcagctatgcgatgcattgggtgcgtcaggcgccaggtaagggcttagagtgggtggcggttatctcttatgacggtagcaacaagtactacgccgatagcgttaaaggccgcttcacgattagccgcgacaacagcaaaaataccttatacttacagatgaattctttacgcgccgaggatacggccgtttattattgtgcccgtggtcgctctcgcatggacgtttggggtcagtggggccaaggtaccttagtgaccgtgtcttctggtggcagcagccgttcttcttcttctggtggcggtggtagcggcggcggtggcgaaatcgtgctgacccaaagcccggccaccctgagcctgagcccgggcgaacgcgccaccttatcttgccgtgcgtctcagtctgtttctagctcttacttagcgtggtaccagcaaaaaccaggccaggccccacgtttactgatctacggcgcgagctctcgtgccacgggtattccagcccgcttcagcggcagcggtagcggcaccgactttaccctgacgatcagccgtctggagccagaagatttcgccgtttattactgtcagtctagcgacaatgcgacggatatcacgcaaccggtgtttggtcaaggtacgaaagttgaaattaaa

SEQ ID NO: 520 - DNA, 759 bp, synthetic construct
  source 1..759: mol_type = other DNA
caggtgcagttagttgaaagcggcggtggtgtggtgcaaccgggtcgtagcttacgtttatcttgcgcggcctctggctttacctttagcagctatgcgatgcattgggtgcgtcaggcgccaggtaagggcttagagtgggtggcggttatctcttatgacggtagcaacaagtactacgccgatagcgttaaaggccgcttcacgattagccgcgacaacagcaaaaataccttatacttacagatgaattctttacgcgccgaggatacggccgtttattattgtgcccgtggtcgctacgacatcttaacgcgttatggttactatttcgattattggggccaatggggtcaaggcaccctggtgacggtttcttctggtggctcttctcgtagcagctctagcggcggtggcggcagcggtggcggcggtgaaattgtgctgacccagagcccggccacgctgtctttaagcccgggcgagcgtgccacgttaagctgtcgcgccagccaaagcgttagctctagctatttagcctggtatcaacagaagccaggccaggcgccacgtttattaatctatggtgcctcttctcgtgcgaccggtattccggcgcgctttagcggctctggtagcggcaccgacttcaccctgacgatctctcgtttagagccggaggatttcgcggtgtactattgtcaacaatattatagcccaatcttcatgttcggccaaggcaccaaagttgagatcaaa

SEQ ID NO: 521 - DNA, 768 bp, synthetic construct; identical to SEQ ID NO: 50
  source 1..768: mol_type = other DNA

SEQ ID NO: 522 - DNA, 768 bp, synthetic construct
  source 1..768: mol_type = other DNA
caggtgcagttagttgaaagcggcggtggtgtggtgcaaccgggtcgtagcttacgtttatcttgcgcggcctctggctttacctttagcagctatgcgatgcattgggtgcgtcaggcgccaggtaagggcttagagtgggtggcggttatctcttatgacggtagcaacaagtactacgccgatagcgttaaaggccgcttcacgattagccgcgacaacagcaaaaataccttatacttacagatgaattctttacgcgccgaggatacggccgtttattattgtgcccgtggtcgctactctggtcgcacgggctattcttactggctgcactattggggccagtggggtcaaggtaccctggtgaccgtttcttctggtggtagctctcgcagcagcagctctggcggcggtggcagcggcggtggcggcgagattgtgctgacccagagcccggcgacgttaagcttatctccgggcgaacgcgcgacgttatcttgccgcgcctctcagtctgtgtctagctcttatctggcctggtaccagcaaaaaccaggtcaggcgccgcgcctgttaatctacggcgcctcttctcgcgcgaccggcatcccggcgcgtttcagcggcagcggttctggcaccgatttcacgctgaccatctctcgcctggagccagaagactttgccgtgtattactgcgccgcctgggacgatagcctgaacggtccagttgtgttcggccagggcacgaaggttgaaatcaaa

SEQ ID NO: 523 - DNA, 762 bp, synthetic construct
  source 1..762: mol_type = other DNA
caggtgcagttagttgaaagcggcggtggtgtggtgcaaccgggtcgtagcttacgtttatcttgcgcggcctctggctttacctttagcagctatgcgatgcattgggtgcgtcaggcgccaggtaagggcttagagtgggtggcggttatctcttatgacggtagcaacaagtactacgccgatagcgttaaaggccgcttcacgattagccgcgacaacagcaaaaataccttatacttacagatgaattctttacgcgccgaggatacggccgtttattattgtgcccgtggtcgctactacgactcttctccgccgtacggttatgcctttgatatttggggtcaatggggtcagggcaccctggttacggtttcttctggcggttctagccgtagctctagcagcggtggcggcggctctggcggcggtggcgaaattgtgctgacccagagcccagccaccttatctctgagcccgggtgaacgcgccacgctgtcttgtcgcgcgtctcagtctgtgtctagcagctacttagcgtggtaccagcaaaagccgggccaggccccgcgcttattaatttacggtgcctctagccgtgcgacgggcattccggcccgttttagcggttctggcagcggcacggactttaccttaacgatcagccgcttagaaccagaagactttgcggtttattactgtcaacagagctattctccaccaatcaccttcggccagggcacgaaggttgaaatcaaa

SEQ ID NO: 524 - DNA, 756 bp, synthetic construct
  source 1..756: mol_type = other DNA
caggtgcagttagttgaaagcggcggtggtgtggtgcaaccgggtcgtagcttacgtttatcttgcgcggcctctggctttacctttagcagctatgcgatgcattgggtgcgtcaggcgccaggtaagggcttagagtgggtggcggttatctcttatgacggtagcaacaagtactacgccgatagcgttaaaggccgcttcacgattagccgcgacaacagcaaaaataccttatacttacagatgaattctttacgcgccgaggatacggccgtttattattgtgcccgtggttctgccgcccacggttaccattttgactactggggccaatggggccagggcacgttagttaccgtgagcagcggtggttcttctcgcagctcttctagcggcggcggtggcagcggtggcggcggcgagattgtgttaacccagagcccggcgaccctgagcttatctccgggtgagcgtgcgaccttaagctgtcgcgccagccaatctgttagctctagctacctggcctggtatcagcaaaagccgggtcaggccccacgtctgctgatctatggtgcctctagccgcgccacgggtattccggcgcgctttagcggctctggcagcggcacggactttaccctgacgatcagccgtttagagccagaagacttcgcggtttattactgcggcacgtgggattcttcttctagcctggcggttgttttcggtcagggtaccaaagtggagatcaaa

SEQ ID NO: 525 - DNA, 759 bp, synthetic construct
  source 1..759: mol_type = other DNA
caggtgcagttagttgaaagcggcggtggtgtggtgcaaccgggtcgtagcttacgtttatcttgcgcggcctctggctttacctttagcagctatgcgatgcattgggtgcgtcaggcgccaggtaagggcttagagtgggtggcggttatctcttatgacggtagcaacaagtactacgccgatagcgttaaaggccgcttcacgattagccgcgacaacagcaaaaataccttatacttacagatgaattctttacgcgccgaggatacggccgtttattattgtgcccgtggttctggtaagcgcggttctggcgtggaccactggggccaatggggccagggcacgttagttaccgtgagcagcggtggttcttctcgcagctcttctagcggcggcggtggcagcggtggcggcggcgagattgtgttaacccagagcccggcgaccctgagcttatctccgggtgagcgtgcgaccttaagctgtcgcgccagccaatctgttagctctagctacctggcctggtatcagcaaaagccgggtcaggccccacgtctgctgatctatggtgcctctagccgcgccacgggtattccggcgcgctttagcggctctggcagcggcacggactttaccctgacgatcagccgtttagagccagaagacttcgcggtttattactgcggcacgtgggattcttctttaagcggcctgtcttacgttttcggccaaggcaccaaagttgagatcaaa

SEQ ID NO: 526 - DNA, 750 bp, synthetic construct
  source 1..750: mol_type = other DNA
caggtgcagttagttgaaagcggcggtggtgtggtgcaaccgggtcgtagcttacgtttatcttgcgcggcctctggctttacctttagcagctatgcgatgcattgggtgcgtcaggcgccaggtaagggcttagagtgggtggcggttatctcttatgacggtagcaacaagtactacgccgatagcgttaaaggccgcttcacgattagccgcgacaacagcaaaaataccttatacttacagatgaattctttacgcgccgaggatacggccgtttattattgtgcccgtggttcttacgcctctatcttagatgtgtggggtcaatggggccaaggcaccctggttacggttagcagcggcggctcttctcgctcttctagctctggtggcggcggctctggcggcggtggcgaaattgttctgacccaaagcccggcgaccctgagcctgagcccaggtgaacgcgccaccctgagctgtcgtgcctctcaaagcgtttcttctagctacctggcctggtatcaacagaaaccaggtcaggccccgcgcttactgatttatggtgcgtcttctcgcgcgacgggtatcccagcgcgtttttctggcagcggctctggcaccgatttcacgctgaccatttctcgcctggaaccagaggactttgccgtttattactgccaacagcgttctaattggccatctccaggctttaccttcggtcaaggtaccaaggtggaaattaaa

SEQ ID NO: 527 - DNA, 762 bp, synthetic construct
  source 1..762: mol_type = other DNA
caggtgcagttagttgaaagcggcggtggtgtggtgcaaccgggtcgtagcttacgtttatcttgcgcggcctctggctttacctttagcagctatgcgatgcattgggtgcgtcaggcgccaggtaagggcttagagtgggtggcggttatctcttatgacggtagcaacaagtactacgccgatagcgttaaaggccgcttcacgattagccgcgacaacagcaaaaataccttatacttacagatgaattctttacgcgccgaggatacggccgtttattattgtgcccgtggttcttaccgcacgtcttctagcaaacaatacctggacccgtggggccagtggggtcaaggtaccctggtgaccgtttcttctggtggtagctctcgcagcagcagctctggcggcggtggcagcggcggtggcggcgagattgtgctgacccagagcccggcgacgttaagcttatctccgggcgaacgcgcgacgttatcttgccgcgcctctcagtctgtgtctagctcttatctggcctggtaccagcaaaaaccaggtcaggcgccgcgcctgttaatctacggcgcctcttctcgcgcgaccggcatcccggcgcgtttcagcggcagcggttctggcaccgatttcacgctgaccatctctcgcctggagccagaagactttgccgtgtattactgcgccgcctgggacgatcgtctgaacggttacgtttttggtcagggcaccaaggttgagattaaa

SEQ ID NO: 528 - DNA, 762 bp, synthetic construct
  source 1..762: mol_type = other DNA
caggtgcagttagttgaaagcggcggtggtgtggtgcaaccgggtcgtagcttacgtttatcttgcgcggcctctggctttacctttagcagctatgcgatgcattgggtgcgtcaggcgccaggtaagggcttagagtgggtggcggttatctcttatgacggtagcaacaagtactacgccgatagcgttaaaggccgcttcacgattagccgcgacaacagcaaaaataccttatacttacagatgaattctttacgcgccgaggatacggccgtttattattgtgcccgtggttcttaccgcacgtcttctagcaaacaatacctggacccgtggggccagtggggtcaaggtaccctggtgaccgtttcttctggtggtagctctcgcagcagcagctctggcggcggtggcagcggcggtggcggcgagattgtgctgacccagagcccggcgacgttaagcttatctccgggcgaacgcgcgacgttatcttgccgcgcctctcagtctgtgtctagctcttatctggcctggtaccagcaaaaaccaggtcaggcgccgcgcctgttaatctacggcgcctcttctcgcgcgaccggcatcccggcgcgtttcagcggcagcggttctggcaccgatttcacgctgaccatctctcgcctggagccagaagactttgccgtgtattactgctcttcttacgatagcagctctggttctttagtgttcggccagggcacgaaggttgaaatcaaa

SEQ ID NO: 529 - DNA, 756 bp, synthetic construct
  source 1..756: mol_type = other DNA
caggtgcagttagttgaaagcggcggtggtgtggtgcaaccgggtcgtagcttacgtttatcttgcgcggcctctggctttacctttagcagctatgcgatgcattgggtgcgtcaggcgccaggtaagggcttagagtgggtggcggttatctcttatgacggtagcaacaagtactacgccgatagcgttaaaggccgcttcacgattagccgcgacaacagcaaaaataccttatacttacagatgaattctttacgcgccgaggatacggccgtttattattgtgcccgtggttcttaccgcacgtcttctagcaaacaatacctggacccgtggggccagtggggtcaaggtaccctggtgaccgtttcttctggtggtagctctcgcagcagcagctctggcggcggtggcagcggcggtggcggcgagattgtgctgacccagagcccggcgacgttaagcttatctccgggcgaacgcgcgacgttatcttgccgcgcctctcagtctgtgtctagctcttatctggcctggtaccagcaaaaaccaggtcaggcgccgcgcctgttaatctacggcgcctcttctcgcgcgaccggcatcccggcgcgtttcagcggcagcggttctggcaccgatttcacgctgaccatctctcgcctggagccagaagactttgccgtgtattactgctcttcttacaccagcagctctccagttttcggccaaggcaccaaagttgagatcaaa

SEQ ID NO: 530 - DNA, 759 bp, synthetic construct
  source 1..759: mol_type = other DNA
caggtgcagttagttgaaagcggcggtggtgtggtgcaaccgggtcgtagcttacgtttatcttgcgcggcctctggctttacctttagcagctatgcgatgcattgggtgcgtcaggcgccaggtaagggcttagagtgggtggcggttatctcttatgacggtagcaacaagtactacgccgatagcgttaaaggccgcttcacgattagccgcgacaacagcaaaaataccttatacttacagatgaattctttacgcgccgaggatacggccgtttattattgtgcccgtggtacgaactcttaccgccgcctggtgtacgacgcgttcgatatttggggccaatggggtcaaggcaccctggtgacggtttcttctggtggctcttctcgtagcagctctagcggcggtggcggcagcggtggcggcggtgaaattgtgctgacccagagcccggccacgctgtctttaagcccgggcgagcgtgccacgttaagctgtcgcgccagccaaagcgttagctctagctatttagcctggtatcaacagaagccaggccaggcgccacgtttattaatctatggtgcctcttctcgtgcgaccggtattccggcgcgctttagcggctctggtagcggcaccgacttcaccctgacgatctctcgtttagagccggaggatttcgcggtgtactattgtcaagcctgggatagcagcgacgccgttttcggccaaggcaccaaagttgagatcaaa

SEQ ID NO: 531 - DNA, 765 bp, synthetic construct
  source 1..765: mol_type = other DNA
caggtgcagttagttgaaagcggcggtggtgtggtgcaaccgggtcgtagcttacgtttatcttgcgcggcctctggctttacctttagcagctatgcgatgcattgggtgcgtcaggcgccaggtaagggcttagagtgggtggcggttatctcttatgacggtagcaacaagtactacgccgatagcgttaaaggccgcttcacgattagccgcgacaacagcaaaaataccttatacttacagatgaattctttacgcgccgaggatacggccgtttattattgtgcccgtggtacgaactcttaccgccgcctggtgtacgacgcgttcgatatttggggccaatggggtcaaggcaccctggtgacggtttcttctggtggctcttctcgtagcagctctagcggcggtggcggcagcggtggcggcggtgaaattgtgctgacccagagcccggccacgctgtctttaagcccgggcgagcgtgccacgttaagctgtcgcgccagccaaagcgttagctctagctatttagcctggtatcaacagaagccaggccaggcgccacgtttattaatctatggtgcctcttctcgtgcgaccggtattccggcgcgctttagcggctctggtagcggcaccgacttcaccctgacgatctctcgtttagagccggaggatttcgcggtgtactattgtcaagcctgggatagcagctctacgtacgttgtgttcggccagggcacgaaggttgaaatcaaa

SEQ ID NO: 532 - DNA, 762 bp, synthetic construct
  source 1..762: mol_type = other DNA
caggtgcagttagttgaaagcggcggtggtgtggtgcaaccgggtcgtagcttacgtttatcttgcgcggcctctggctttacctttagcagctatgcgatgcattgggtgcgtcaggcgccaggtaagggcttagagtgggtggcggttatctcttatgacggtagcaacaagtactacgccgatagcgttaaaggccgcttcacgattagccgcgacaacagcaaaaataccttatacttacagatgaattctttacgcgccgaggatacggccgtttattattgtgcccgtggtacgaactcttaccgccgcctggtgtacgacgcgttcgatatttggggccaatggggtcaaggcaccctggtgacggtttcttctggtggctcttctcgtagcagctctagcggcggtggcggcagcggtggcggcggtgaaattgtgctgacccagagcccggccacgctgtctttaagcccgggcgagcgtgccacgttaagctgtcgcgccagccaaagcgttagctctagctatttagcctggtatcaacagaagccaggccaggcgccacgtttattaatctatggtgcctcttctcgtgcgaccggtattccggcgcgctttagcggctctggtagcggcaccgacttcaccctgacgatctctcgtttagagccggaggatttcgcggtgtactattgtcaagcctgggatagcaccccacgcgccgtttttggtcagggcaccaaggttgagattaaa

SEQ ID NO: 533 - DNA, 759 bp, synthetic construct
  source 1..759: mol_type = other DNA
caggtgcagttagttgaaagcggcggtggtgtggtgcaaccgggtcgtagcttacgtttatcttgcgcggcctctggctttacctttagcagctatgcgatgcattgggtgcgtcaggcgccaggtaagggcttagagtgggtggcggttatctcttatgacggtagcaacaagtactacgccgatagcgttaaaggccgcttcacgattagccgcgacaacagcaaaaataccttatacttacagatgaattctttacgcgccgaggatacggccgtttattattgtgcccgtggtacgaactcttaccgccgcctggtgtacgacgcgttcgatatttggggccaatggggtcaaggcaccctggtgacggtttcttctggtggctcttctcgtagcagctctagcggcggtggcggcagcggtggcggcggtgaaattgtgctgacccagagcccggccacgctgtctttaagcccgggcgagcgtgccacgttaagctgtcgcgccagccaaagcgttagctctagctatttagcctggtatcaacagaagccaggccaggcgccacgtttattaatctatggtgcctcttctcgtgcgaccggtattccggcgcgctttagcggctctggtagcggcaccgacttcaccctgacgatctctcgtttagagccggaggatttcgcggtgtactattgtcaacaacgtagcaattggccattaacgttcggccaaggcaccaaagttgagatcaaa

SEQ ID NO: 534 - DNA, 765 bp, synthetic construct
  source 1..765: mol_type = other DNA
caggtgcagttagttgaaagcggcggtggtgtggtgcaaccgggtcgtagcttacgtttatcttgcgcggcctctggctttacctttagcagctatgcgatgcattgggtgcgtcaggcgccaggtaagggcttagagtgggtggcggttatctcttatgacggtagcaacaagtactacgccgatagcgttaaaggccgcttcacgattagccgcgacaacagcaaaaataccttatacttacagatgaattctttacgcgccgaggatacggccgtttattattgtgcccgtggtacgaactcttaccgccgcctggtgtacgacgcgttcgatatttggggccaatggggtcaaggcaccctggtgacggtttcttctggtggctcttctcgtagcagctctagcggcggtggcggcagcggtggcggcggtgaaattgtgctgacccagagcccggccacgctgtctttaagcccgggcgagcgtgccacgttaagctgtcgcgccagccaaagcgttagctctagctatttagcctggtatcaacagaagccaggccaggcgccacgtttattaatctatggtgcctcttctcgtgcgaccggtattccggcgcgctttagcggctctggtagcggcaccgacttcaccctgacgatctctcgtttagagccggaggatttcgcggtgtactattgtcaacaacgtagcaattggtggccaccattcacgtttggtcagggcaccaaggttgagattaaa

SEQ ID NO: 535 - DNA, 759 bp, synthetic construct
  source 1..759: mol_type = other DNA
caggtgcagttagttgaaagcggcggtggtgtggtgcaaccgggtcgtagcttacgtttatcttgcgcggcctctggctttacctttagcagctatgcgatgcattgggtgcgtcaggcgccaggtaagggcttagagtgggtggcggttatctcttatgacggtagcaacaagtactacgccgatagcgttaaaggccgcttcacgattagccgcgacaacagcaaaaataccttatacttacagatgaattctttacgcgccgaggatacggccgtttattattgtgcccgtggtacgaactcttaccgccgcctggtgtacgacgcgttcgatatttggggccaatggggtcaaggcaccctggtgacggtttcttctggtggctcttctcgtagcagctctagcggcggtggcggcagcggtggcggcggtgaaattgtgctgacccagagcccggccacgctgtctttaagcccgggcgagcgtgccacgttaagctgtcgcgccagccaaagcgttagctctagctatttagcctggtatcaacagaagccaggccaggcgccacgtttattaatctatggtgcctcttctcgtgcgaccggtattccggcgcgctttagcggctctggtagcggcaccgacttcaccctgacgatctctcgtttagagccggaggatttcgcggtgtactattgtcaacaaagctatagcccaccaccaacgtttggtcagggcaccaaggttgagattaaa

SEQ ID NO: 536 - DNA, 756 bp, synthetic construct
  source 1..756: mol_type = other DNA
caggtgcagttagttgaaagcggcggtggtgtggtgcaaccgggtcgtagcttacgtttatcttgcgcggcctctggctttacctttagcagctatgcgatgcattgggtgcgtcaggcgccaggtaagggcttagagtgggtggcggttatctcttatgacggtagcaacaagtactacgccgatagcgttaaaggccgcttcacgattagccgcgacaacagcaaaaataccttatacttacagatgaattctttacgcgccgaggatacggccgtttattattgtgcccgtggtacgaactcttaccgccgcctggtgtacgacgcgttcgatatttggggccaatggggtcaaggcaccctggtgacggtttcttctggtggctcttctcgtagcagctctagcggcggtggcggcagcggtggcggcggtgaaattgtgctgacccagagcccggccacgctgtctttaagcccgggcgagcgtgccacgttaagctgtcgcgccagccaaagcgttagctctagctatttagcctggtatcaacagaagccaggccaggcgccacgtttattaatctatggtgcctcttctcgtgcgaccggtattccggcgcgctttagcggctctggtagcggcaccgacttcaccctgacgatctctcgtttagagccggaggatttcgcggtgtactattgtcaacaatataataattggccaacgttcggtcagggtaccaaagtggagatcaaa

SEQ ID NO: 537 - DNA, 765 bp, synthetic construct
  source 1..765: mol_type = other DNA
caggtgcagttagttgaaagcggcggtggtgtggtgcaaccgggtcgtagcttacgtttatcttgcgcggcctctggctttacctttagcagctatgcgatgcattgggtgcgtcaggcgccaggtaagggcttagagtgggtggcggttatctcttatgacggtagcaacaagtactacgccgatagcgttaaaggccgcttcacgattagccgcgacaacagcaaaaataccttatacttacagatgaattctttacgcgccgaggatacggccgtttattattgtgcccgtggtacgaactcttaccgccgcctggtgtacgacgcgttcgatatttggggccaatggggtcaaggcaccctggtgacggtttcttctggtggctcttctcgtagcagctctagcggcggtggcggcagcggtggcggcggtgaaattgtgctgacccagagcccggccacgctgtctttaagcccgggcgagcgtgccacgttaagctgtcgcgccagccaaagcgttagctctagctatttagcctggtatcaacagaagccaggccaggcgccacgtttattaatctatggtgcctcttctcgtgcgaccggtattccggcgcgctttagcggctctggtagcggcaccgacttcaccctgacgatctctcgtttagagccggaggatttcgcggtgtactattgtcaatcttatgatagctctttatctggtagcgtttttggccagggtacgaaggtggagatcaaa

SEQ ID NO: 538 - DNA, 768 bp, synthetic construct
  source 1..768: mol_type = other DNA
caggtgcagttagttgaaagcggcggtggtgtggtgcaaccgggtcgtagcttacgtttatcttgcgcggcctctggctttacctttagcagctatgcgatgcattgggtgcgtcaggcgccaggtaagggcttagagtgggtggcggttatctcttatgacggtagcaacaagtactacgccgatagcgttaaaggccgcttcacgattagccgcgacaacagcaaaaataccttatacttacagatgaattctttacgcgccgaggatacggccgtttattattgtgcccgtggtacgaactcttaccgccgcctggtgtacgacgcgttcgatatttggggccaatggggtcaaggcaccctggtgacggtttcttctggtggctcttctcgtagcagctctagcggcggtggcggcagcggtggcggcggtgaaattgtgctgacccagagcccggccacgctgtctttaagcccgggcgagcgtgccacgttaagctgtcgcgccagccaaagcgttagctctagctatttagcctggtatcaacagaagccaggccaggcgccacgtttattaatctatggtgcctcttctcgtgcgaccggtattccggcgcgctttagcggctctggtagcggcaccgacttcaccctgacgatctctcgtttagagccggaggatttcgcggtgtactattgtcaatcttatgatagctcttctttaggtgcggttgtgtttggccaaggtacgaaagttgagattaaa

SEQ ID NO: 539 - DNA, 759 bp, synthetic construct
  source 1..759: mol_type = other DNA
caggtgcagttagttgaaagcggcggtggtgtggtgcaaccgggtcgtagcttacgtttatcttgcgcggcctctggctttacctttagcagctatgcgatgcattgggtgcgtcaggcgccaggtaagggcttagagtgggtggcggttatctcttatgacggtagcaacaagtactacgccgatagcgttaaaggccgcttcacgattagccgcgacaacagcaaaaataccttatacttacagatgaattctttacgcgccgaggatacggccgtttattattgtgcccgtggtacgaactcttaccgccgcctggtgtacgacgcgttcgatatttggggccaatggggtcaaggcaccctggtgacggtttcttctggtggctcttctcgtagcagctctagcggcggtggcggcagcggtggcggcggtgaaattgtgctgacccagagcccggccacgctgtctttaagcccgggcgagcgtgccacgttaagctgtcgcgccagccaaagcgttagctctagctatttagcctggtatcaacagaagccaggccaggcgccacgtttattaatctatggtgcctcttctcgtgcgaccggtattccggcgcgctttagcggctctggtagcggcaccgacttcaccctgacgatctctcgtttagagccggaggatttcgcggtgtactattgtcaaacgtgggatagctttggtcaagttttcggccaaggcaccaaagttgagatcaaa

SEQ ID NO: 540 - DNA, 765 bp, synthetic construct
  source 1..765: mol_type = other DNA
caggtgcagttagttgaaagcggcggtggtgtggtgcaaccgggtcgtagcttacgtttatcttgcgcggcctctggctttacctttagcagctatgcgatgcattgggtgcgtcaggcgccaggtaagggcttagagtgggtggcggttatctcttatgacggtagcaacaagtactacgccgatagcgttaaaggccgcttcacgattagccgcgacaacagcaaaaataccttatacttacagatgaattctttacgcgccgaggatacggccgtttattattgtgcccgtggtacgaactcttaccgccgcctggtgtacgacgcgttcgatatttggggccaatggggtcaaggcaccctggtgacggtttcttctggtggctcttctcgtagcagctctagcggcggtggcggcagcggtggcggcggtgaaattgtgctgacccagagcccggccacgctgtctttaagcccgggcgagcgtgccacgttaagctgtcgcgccagccaaagcgttagctctagctatttagcctggtatcaacagaagccaggccaggcgccacgtttattaatctatggtgcctcttctcgtgcgaccggtattccggcgcgctttagcggctctggtagcggcaccgacttcaccctgacgatctctcgtttagagccggaggatttcgcggtgtactattgtcaagtttgggatagcagctctgcccacgttgtgttcggccagggcacgaaggttgaaatcaaa

SEQ ID NO: 541 - DNA, 768 bp, synthetic construct
  source 1..768: mol_type = other DNA
caggtgcagttagttgaaagcggcggtggtgtggtgcaaccgggtcgtagcttacgtttatcttgcgcggcctctggctttacctttagcagctatgcgatgcattgggtgcgtcaggcgccaggtaagggcttagagtgggtggcggttatctcttatgacggtagcaacaagtactacgccgatagcgttaaaggccgcttcacgattagccgcgacaacagcaaaaataccttatacttacagatgaattctttacgcgccgaggatacggccgtttattattgtgcccgtggtacgaactcttaccgccgcctggtgtacgacgcgttcgatatttggggccaatggggtcaaggcaccctggtgacggtttcttctggtggctcttctcgtagcagctctagcggcggtggcggcagcggtggcggcggtgaaattgtgctgacccagagcccggccacgctgtctttaagcccgggcgagcgtgccacgttaagctgtcgcgccagccaaagcgttagctctagctatttagcctggtatcaacagaagccaggccaggcgccacgtttattaatctatggtgcctcttctcgtgcgaccggtattccggcgcgctttagcggctctggtagcggcaccgacttcaccctgacgatctctcgtttagagccggaggatttcgcggtgtactattgtcaagtttgggatagcagctctgaccactctgtggtttttggccagggtacgaaggtggagatcaaa

SEQ ID NO: 542 - DNA, 759 bp, synthetic construct
  source 1..759: mol_type = other DNA
caggtgcagttagttgaaagcggcggtggtgtggtgcaaccgggtcgtagcttacgtttatcttgcgcggcctctggctttacctttagcagctatgcgatgcattgggtgcgtcaggcgccaggtaagggcttagagtgggtggcggttatctcttatgacggtagcaacaagtactacgccgatagcgttaaaggccgcttcacgattagccgcgacaacagcaaaaataccttatacttacagatgaattctttacgcgccgaggatacggccgtttattattgtgcccgtggttactcttaccgctctatgtaccgtgattacttcgatgtttggggccagtggggccaaggtacgctggtgaccgtgtcttctggtggttctagccgctctagcagcagcggtggcggcggtagcggcggcggtggcgaaatcgtgctgacccagagcccggcgaccttatctctgtctccaggcgaacgtgccaccttatcttgtcgtgcctctcaaagcgttagctctagctacctggcgtggtaccaacagaagccgggtcaagcgccgcgtttactgatctacggtgcgtcttctcgcgccaccggcattccagcgcgtttttctggcagcggctctggtaccgattttacgttaaccatttctcgcttagaaccagaggatttcgcggtttattattgtcagcaatactacagcaataccccatacacgttcggccaaggcaccaaagttgagatcaaa

SEQ ID NO: 543 - DNA, 759 bp, synthetic construct
  source 1..759: mol_type = other DNA
caggtgcagttagttgaaagcggcggtggtgtggtgcaaccgggtcgtagcttacgtttatcttgcgcggcctctggctttacctttagcagctatgcgatgcattgggtgcgtcaggcgccaggtaagggcttagagtgggtggcggttatctcttatgacggtagcaacaagtactacgccgatagcgttaaaggccgcttcacgattagccgcgacaacagcaaaaataccttatacttacagatgaattctttacgcgccgaggatacggccgtttattattgtgcccgtggttactaccgcacggccaactatctgtacggtatggatgtttggggccagtggggccaaggtacgctggtgaccgtgtcttctggtggttctagccgctctagcagcagcggtggcggcggtagcggcggcggtggcgaaatcgtgctgacccagagcccggcgaccttatctctgtctccaggcgaacgtgccaccttatcttgtcgtgcctctcaaagcgttagctctagctacctggcgtggtaccaacagaagccgggtcaagcgccgcgtttactgatctacggtgcgtcttctcgcgccaccggcattccagcgcgtttttctggcagcggctctggtaccgattttacgttaaccatttctcgcttagaaccagaggatttcgcggtttattattgtagctcttacacgagcagcagccacttagccttcggccaaggcaccaaagttgagatcaaa

SEQ ID NO: 544 - DNA, 750 bp, synthetic construct
  source 1..750: mol_type = other DNA
caggtgcagttagttgaaagcggcggtggtgtggtgcaaccgggtcgtagcttacgtttatcttgcgcggcctctggctttacctttagcagctatgcgatgcattgggtgcgtcaggcgccaggtaagggcttagagtgggtggcggttatctcttatgacggtagcaacaagtactacgccgatagcgttaaaggccgcttcacgattagccgcgacaacagcaaaaataccttatacttacagatgaattctttacgcgccgaggatacggccgtttattattgtgcccgtcacgccgacttcgagcaacaactggcgttcgactattggggtcagtggggccagggtacgttagtgaccgtgagctctggtggttcttctcgttcttctagcagcggcggtggcggctctggcggcggcggtgaaattgttctgacccagagcccggcgaccctgtctttaagcccaggtgaacgtgcgacgctgtcttgtcgcgcgtctcaatctgtgtctagctcttatttagcgtggtatcaacaaaaaccaggccaagccccgcgtctgttaatttacggtgccagctctcgcgccacgggcattccggcccgttttagcggtagcggcagcggtacggattttaccttaacgattagccgcttagagccggaggactttgccgtgtactattgcatgcaaagccgccaattaccgctgaccttcggtcaaggtaccaaggtggaaattaaa

SEQ ID NO: 545 - DNA, 747 bp, synthetic construct
  source 1..747: mol_type = other DNA
caggtgcagttagttgaaagcggcggtggtgtggtgcaaccgggtcgtagcttacgtttatcttgcgcggcctctggctttacctttagcagctatgcgatgcattgggtgcgtcaggcgccaggtaagggcttagagtgggtggcggttatctcttatgacggtagcaacaagtactacgccgatagcgttaaaggccgcttcacgattagccgcgacaacagcaaaaataccttatacttacagatgaattctttacgcgccgaggatacggccgtttattattgtgcccgtcacgccggtttaatctctatcgcggcgttagacgaatggggtcagtggggccagggtacgttagtgaccgtgagctctggtggttcttctcgttcttctagcagcggcggtggcggctctggcggcggcggtgaaattgttctgacccagagcccggcgaccctgtctttaagcccaggtgaacgtgcgacgctgtcttgtcgcgcgtctcaatctgtgtctagctcttatttagcgtggtatcaacaaaaaccaggccaagccccgcgtctgttaatttacggtgccagctctcgcgccacgggcattccggcccgttttagcggtagcggcagcggtacggattttaccttaacgattagccgcttagagccggaggactttgccgtgtactattgccaaagctggttcccacacgtggtgtttggtcaaggtacgaaagttgaaattaaa

SEQ ID NO: 546 - DNA, 750 bp, synthetic construct
  source 1..750: mol_type = other DNA
caggtgcagttagttgaaagcggcggtggtgtggtgcaaccgggtcgtagcttacgtttatcttgcgcggcctctggctttacctttagcagctatgcgatgcattgggtgcgtcaggcgccaggtaagggcttagagtgggtggcggttatctcttatgacggtagcaacaagtactacgccgatagcgttaaaggccgcttcacgattagccgcgacaacagcaaaaataccttatacttacagatgaattctttacgcgccgaggatacggccgtttattattgtgcccgtcacgccggtttaatctctatcgcggcgttagacgaatggggtcagtggggccagggtacgttagtgaccgtgagctctggtggttcttctcgttcttctagcagcggcggtggcggctctggcggcggcggtgaaattgttctgacccagagcccggcgaccctgtctttaagcccaggtgaacgtgcgacgctgtcttgtcgcgcgtctcaatctgtgtctagctcttatttagcgtggtatcaacaaaaaccaggccaagccccgcgtctgttaatttacggtgccagctctcgcgccacgggcattccggcccgttttagcggtagcggcagcggtacggattttaccttaacgattagccgcttagagccggaggactttgccgtgtactattgccaaacctgggactctggtagcgtggtgttcggtcaaggtaccaaggtggaaattaaa

SEQ ID NO: 547 - DNA, 783 bp, synthetic construct
  source 1..783: mol_type = other DNA
caggtgcagttagttgaaagcggcggtggtgtggtgcaaccgggtcgtagcttacgtttatcttgcgcggcctctggctttacctttagcagctatgcgatgcattgggtgcgtcaggcgccaggtaagggcttagagtgggtggcggttatctcttatgacggtagcaacaagtactacgccgatagcgttaaaggccgcttcacgattagccgcgacaacagcaaaaataccttatacttacagatgaattctttacgcgccgaggatacggccgtttattattgtgcccgtcacgccggtttacgcggttacagctatggttacaattctaccccgccgcgcccaaactggtttgatccgtggggccaatggggtcaaggtacgctggttacggtgagcagcggtggcagctctcgtagcagctctagcggcggtggcggcagcggcggcggcggcgaaatcgttctgacgcaaagcccggcgacgctgtctttatctccgggtgagcgcgcgacgctgtcttgccgcgcgagccaatctgtgtctagctcttacctggcgtggtatcaacagaagccaggtcaggccccacgcttactgatttatggtgcgagcagccgcgcgaccggcatcccagcgcgtttttctggtagcggctctggtacggatttcacgctgacgatttctcgtctggagccggaggacttcgcggtgtattactgtcaaacgtggggcacgggcgaagtggttttcggtcagggtacgaaagttgaaattaaa

SEQ ID NO: 548 - DNA, 744 bp, synthetic construct
  source 1..744: mol_type = other DNA
caggtgcagttagttgaaagcggcggtggtgtggtgcaaccgggtcgtagcttacgtttatcttgcgcggcctctggctttacctttagcagctatgcgatgcattgggtgcgtcaggcgccaggtaagggcttagagtgggtggcggttatctcttatgacggtagcaacaagtactacgccgatagcgttaaaggccgcttcacgattagccgcgacaacagcaaaaataccttatacttacagatgaattctttacgcgccgaggatacggccgtttattattgtgcccgtcacggtgcccgccgccacttactggattactggggtcagtggggtcagggcaccttagttacggtgagcagcggcggttcttctcgctctagctcttctggcggcggcggtagcggcggtggcggcgaaatcgtgctgacgcagagcccggcgaccctgagcctgtctccaggcgagcgcgcgaccctgtcttgccgcgcctctcagtctgtttctagctcttatttagcgtggtaccagcagaagccaggccaagcgccacgcctgctgatttacggcgcctcttctcgtgccacgggtatcccggcgcgtttcagcggcagcggtagcggcaccgacttcaccctgaccatctctcgtctggagccagaggatttcgccgtgtactattgtcagacctgggacagcttcggtcaagtgtttggccaaggtacgaaggtggagattaaa

SEQ ID NO: 549 - DNA, 768 bp, synthetic construct
  source 1..768: mol_type = other DNA
caggtgcagttagttgaaagcggcggtggtgtggtgcaaccgggtcgtagcttacgtttatcttgcgcggcctctggctttacctttagcagctatgcgatgcattgggtgcgtcaggcgccaggtaagggcttagagtgggtggcggttatctcttatgacggtagcaacaagtactacgccgatagcgttaaaggccgcttcacgattagccgcgacaacagcaaaaataccttatacttacagatgaattctttacgcgccgaggatacggccgtttattattgtgcccgtcacggtggtggtacgtcttctggcccggacggttatgactatgcgatggatgtttggggtcaatggggccagggcaccttagttacggtttctagcggtggtagcagccgttctagcagctctggcggcggcggtagcggcggtggcggcgaaattgtgctgacccagtctccagcgacgttaagcctgagcccaggcgagcgcgccaccttatcttgtcgtgccagccaaagcgttagcagctcttacctggcctggtatcaacaaaaaccgggccaagcgccacgcttactgatctacggtgccagcagccgtgccaccggcattccagcgcgtttttctggtagcggcagcggtacggattttacgttaacgatttctcgcctggagccggaggattttgccgtgtactactgtcagcagcataactcttacccactgacgtttggccagggtacgaaggtggagatcaaa

SEQ ID NO: 550 - DNA, 741 bp, synthetic construct
  source 1..741: mol_type = other DNA
caggtgcagttagttgaaagcggcggtggtgtggtgcaaccgggtcgtagcttacgtttatcttgcgcggcctctggctttacctttagcagctatgcgatgcattgggtgcgtcaggcgccaggtaagggcttagagtgggtggcggttatctcttatgacggtagcaacaagtactacgccgatagcgttaaaggccgcttcacgattagccgcgacaacagcaaaaataccttatacttacagatgaattctttacgcgccgaggatacggccgtttattattgtgcccgtcacggtggtttattagacgcctttgatatctggggtcagtggggtcagggcaccttagttacggtgagcagcggcggttcttctcgctctagctcttctggcggcggcggtagcggcggtggcggcgaaatcgtgctgacgcagagcccggcgaccctgagcctgtctccaggcgagcgcgcgaccctgtcttgccgcgcctctcagtctgtttctagctcttatttagcgtggtaccagcagaagccaggccaagcgccacgcctgctgatttacggcgcctcttctcgtgccacgggtatcccggcgcgtttcagcggcagcggtagcggcaccgacttcaccctgaccatctctcgtctggagccagaggatttcgccgtgtactattgtcagcagtacgattacttagttagctttggccaaggtacgaaggtggagattaaa

SEQ ID NO: 551 - DNA, 747 bp, synthetic construct
  source 1..747: mol_type = other DNA
caggtgcagttagttgaaagcggcggtggtgtggtgcaaccgggtcgtagcttacgtttatcttgcgcggcctctggctttacctttagcagctatgcgatgcattgggtgcgtcaggcgccaggtaagggcttagagtgggtggcggttatctcttatgacggtagcaacaagtactacgccgatagcgttaaaggccgcttcacgattagccgcgacaacagcaaaaataccttatacttacagatgaattctttacgcgccgaggatacggccgtttattattgtgcccgtcacggtaagatcggtccaaacgcgtttgacatctggggccaatggggccagggcacgttagttaccgtgagcagcggtggttcttctcgcagctcttctagcggcggcggtggcagcggtggcggcggcgagattgtgttaacccagagcccggcgaccctgagcttatctccgggtgagcgtgcgaccttaagctgtcgcgccagccaatctgttagctctagctacctggcctggtatcagcaaaagccgggtcaggccccacgtctgctgatctatggtgcctctagccgcgccacgggtattccggcgcgctttagcggctctggcagcggcacggactttaccctgacgatcagccgtttagagccagaagacttcgcggtttattactgccagcaatatgactcttacccgccgaccttcggtcaaggtaccaaggtggaaattaaa

SEQ ID NO: 552 - DNA, 756 bp, synthetic construct
  source 1..756: mol_type = other DNA
caggtgcagttagttgaaagcggcggtggtgtggtgcaaccgggtcgtagcttacgtttatcttgcgcggcctctggctttacctttagcagctatgcgatgcattgggtgcgtcaggcgccaggtaagggcttagagtgggtggcggttatctcttatgacggtagcaacaagtactacgccgatagcgttaaaggccgcttcacgattagccgcgacaacagcaaaaataccttatacttacagatgaattctttacgcgccgaggatacggccgtttattattgtgcccgtcacggtttaaactggaacgttatggactttgcgttcgacatttggggtcagtggggccagggtacgttagtgaccgtgagctctggtggttcttctcgttcttctagcagcggcggtggcggctctggcggcggcggtgaaattgttctgacccagagcccggcgaccctgtctttaagcccaggtgaacgtgcgacgctgtcttgtcgcgcgtctcaatctgtgtctagctcttatttagcgtggtatcaacaaaaaccaggccaagccccgcgtctgttaatttacggtgccagctctcgcgccacgggcattccggcccgttttagcggtagcggcagcggtacggattttaccttaacgattagccgcttagagccggaggactttgccgtgtactattgccaacagtacgactctccgccggtgacgttcggtcaaggcacgaaagtggaaatcaaa

SEQ ID NO: 553 - DNA, 756 bp, synthetic construct
  source 1..756: mol_type = other DNA
caggtgcagttagttgaaagcggcggtggtgtggtgcaaccgggtcgtagcttacgtttatcttgcgcggcctctggctttacctttagcagctatgcgatgcattgggtgcgtcaggcgccaggtaagggcttagagtgggtggcggttatctcttatgacggtagcaacaagtactacgccgatagcgttaaaggccgcttcacgattagccgcgacaacagcaaaaataccttatacttacagatgaattctttacgcgccgaggatacggccgtttattattgtgcccgtcacggtcgcgagttaatcccacagtttgaccactggggccaatggggccagggcacgttagttaccgtgagcagcggtggttcttctcgcagctcttctagcggcggcggtggcagcggtggcggcggcgagattgtgttaacccagagcccggcgaccctgagcttatctccgggtgagcgtgcgaccttaagctgtcgcgccagccaatctgttagctctagctacctggcctggtatcagcaaaagccgggtcaggccccacgtctgctgatctatggtgcctctagccgcgccacgggtattccggcgcgctttagcggctctggcagcggcacggactttaccctgacgatcagccgtttagagccagaagacttcgcggtttattactgcgcggcctgggatgactctttaaatattggctgggttttcggtcaaggcacgaaagtggaaatcaaa

SEQ ID NO: 554 - DNA, 759 bp, synthetic construct
  source 1..759: mol_type = other DNA
caggtgcagttagttgaaagcggcggtggtgtggtgcaaccgggtcgtagcttacgtttatcttgcgcggcctctggctttacctttagcagctatgcgatgcattgggtgcgtcaggcgccaggtaagggcttagagtgggtggcggttatctcttatgacggtagcaacaagtactacgccgatagcgttaaaggccgcttcacgattagccgcgacaacagcaaaaataccttatacttacagatgaattctttacgcgccgaggatacggccgtttattattgtgcccgtcacggtcgcgagttaatcccacagtttgactactggggccaatggggccagggcacgttagttaccgtgagcagcggtggttcttctcgcagctcttctagcggcggcggtggcagcggtggcggcggcgagattgtgttaacccagagcccggcgaccctgagcttatctccgggtgagcgtgcgaccttaagctgtcgcgccagccaatctgttagctctagctacctggcctggtatcagcaaaagccgggtcaggccccacgtctgctgatctatggtgcctctagccgcgccacgggtattccggcgcgctttagcggctctggcagcggcacggactttaccctgacgatcagccgtttagagccagaagacttcgcggtttattactgcgcggcctgggatgacggtcgcagcggcccgaactgggttttcggtcagggtaccaaagtggagatcaaa

SEQ ID NO: 555 - DNA, 747 bp, synthetic construct
  source 1..747: mol_type = other DNA
caggtgcagttagttgaaagcggcggtggtgtggtgcaaccgggtcgtagcttacgtttatcttgcgcggcctctggctttacctttagcagctatgcgatgcattgggtgcgtcaggcgccaggtaagggcttagagtgggtggcggttatctcttatgacggtagcaacaagtactacgccgatagcgttaaaggccgcttcacgattagccgcgacaacagcaaaaataccttatacttacagatgaattctttacgcgccgaggatacggccgtttattattgtgcccgtcacggttctttagccggtcgcgcgtttgactactggggccaatggggccagggcacgttagttaccgtgagcagcggtggttcttctcgcagctcttctagcggcggcggtggcagcggtggcggcggcgagattgtgttaacccagagcccggcgaccctgagcttatctccgggtgagcgtgcgaccttaagctgtcgcgccagccaatctgttagctctagctacctggcctggtatcagcaaaagccgggtcaggccccacgtctgctgatctatggtgcctctagccgcgccacgggtattccggcgcgctttagcggctctggcagcggcacggactttaccctgacgatcagccgtttagagccagaagacttcgcggtttattactgccagcaatatgacaacccaccggtgaccttcggtcaaggtaccaaggtggaaattaaa

SEQ ID NO: 556 - DNA, 744 bp, synthetic construct
  source 1..744: mol_type = other DNA
caggtgcagttagttgaaagcggcggtggtgtggtgcaaccgggtcgtagcttacgtttatcttgcgcggcctctggctttacctttagcagctatgcgatgcattgggtgcgtcaggcgccaggtaagggcttagagtgggtggcggttatctcttatgacggtagcaacaagtactacgccgatagcgttaaaggccgcttcacgattagccgcgacaacagcaaaaataccttatacttacagatgaattctttacgcgccgaggatacggccgtttattattgtgcccgtcacggtgttttagacttcgccatggatgtgtggggtcaatggggccaaggcaccctggttacggttagcagcggcggctcttctcgctcttctagctctggtggcggcggctctggcggcggtggcgaaattgttctgacccaaagcccggcgaccctgagcctgagcccaggtgaacgcgccaccctgagctgtcgtgcctctcaaagcgtttcttctagctacctggcctggtatcaacagaaaccaggtcaggccccgcgcttactgatttatggtgcgtcttctcgcgcgacgggtatcccagcgcgtttttctggcagcggctctggcaccgatttcacgctgaccatttctcgcctggaaccagaggactttgccgtttattactgccaacagcattctagcccaccaatcacctttggccaaggtacgaaggtggagattaaa

SEQ ID NO: 557 - DNA, 750 bp, synthetic construct
  source 1..750: mol_type = other DNA
caggtgcagttagttgaaagcggcggtggtgtggtgcaaccgggtcgtagcttacgtttatcttgcgcggcctctggctttacctttagcagctatgcgatgcattgggtgcgtcaggcgccaggtaagggcttagagtgggtggcggttatctcttatgacggtagcaacaagtactacgccgatagcgttaaaggccgcttcacgattagccgcgacaacagcaaaaataccttatacttacagatgaattctttacgcgccgaggatacggccgtttattattgtgcccgtcaccacccatctgccgccggtgcgtttgacatctggggccaatggggccagggcacgttagttaccgtgagcagcggtggttcttctcgcagctcttctagcggcggcggtggcagcggtggcggcggcgagattgtgttaacccagagcccggcgaccctgagcttatctccgggtgagcgtgcgaccttaagctgtcgcgccagccaatctgttagctctagctacctggcctggtatcagcaaaagccgggtcaggccccacgtctgctgatctatggtgcctctagccgcgccacgggtattccggcgcgctttagcggctctggcagcggcacggactttaccctgacgatcagccgtttagagccagaagacttcgcggtttattactgccagcaaagctactctacgccgccgtggaccttcggtcaaggtaccaaggtggaaattaaa

SEQ ID NO: 558 - DNA, 738 bp, synthetic construct
  source 1..738: mol_type = other DNA
caggtgcagttagttgaaagcggcggtggtgtggtgcaaccgggtcgtagcttacgtttatcttgcgcggcctctggctttacctttagcagctatgcgatgcattgggtgcgtcaggcgccaggtaagggcttagagtgggtggcggttatctcttatgacggtagcaacaagtactacgccgatagcgttaaaggccgcttcacgattagccgcgacaacagcaaaaataccttatacttacagatgaattctttacgcgccgaggatacggccgtttattattgtgcccgtcacatccgcggtggtatgaacgtttggggccagtggggtcaaggcacgctggtgaccgtttcttctggcggcagcagccgctcttcttcttctggcggtggtggcagcggcggtggcggcgagattgtgctgacgcagagcccagcgaccctgagcctgagcccgggcgagcgcgcgacgttaagctgccgtgccagccaatctgttagctcttcttacctggcctggtatcaacagaagccgggccaagccccgcgcctgttaatctatggcgcgtctagccgcgccacgggcatcccagcccgctttagcggctctggcagcggcacggattttaccttaacgattagccgtttagagccggaagacttcgccgtgtactactgccaacagtactatagcccaccgatcacgttcggccagggcacgaaggttgagattaaa

SEQ ID NO: 559 - DNA, 774 bp, synthetic construct
  source 1..774: mol_type = other DNA
caggtgcagttagttgaaagcggcggtggtgtggtgcaaccgggtcgtagcttacgtttatcttgcgcggcctctggctttacctttagcagctatgcgatgcattgggtgcgtcaggcgccaggtaagggcttagagtgggtggcggttatctcttatgacggtagcaacaagtactacgccgatagcgttaaaggccgcttcacgattagccgcgacaacagcaaaaataccttatacttacagatgaattctttacgcgccgaggatacggccgtttattattgtgcccgtcacccacgccacatcacggccagcaaaccatacaccggtggcggcagccaatactggggtcagtggggccagggcacgttagttacggttagctctggtggcagcagccgcagcagctctagcggcggcggtggcagcggtggcggcggcgaaattgtgctgacccaatctccggccacgctgagcctgtctccgggtgagcgcgcgacgttatcttgccgcgcgtctcagtctgtgagctcttcttatttagcgtggtaccaacagaaaccgggtcaggccccacgcctgttaatctacggtgcgagcagccgcgcgaccggcatcccggcgcgtttctctggcagcggctctggtaccgatttcacgttaaccatctctcgtttagaaccagaagatttcgcggtttactactgccaggtgtgggactcttctacgaatcactgggtgtttggccaaggtacgaaagttgagattaaa

SEQ ID NO: 560 - DNA, 744 bp, synthetic construct
  source 1..744: mol_type = other DNA
caggtgcagttagttgaaagcggcggtggtgtggtgcaaccgggtcgtagcttacgtttatcttgcgcggcctctggctttacctttagcagctatgcgatgcattgggtgcgtcaggcgccaggtaagggcttagagtgggtggcggttatctcttatgacggtagcaacaagtactacgccgatagcgttaaaggccgcttcacgattagccgcgacaacagcaaaaataccttatacttacagatgaattctttacgcgccgaggatacggccgtttattattgtgcccgtcaccgcgccggttaccacatcgatggctggggtcaatggggccaaggcaccctggttacggttagcagcggcggctcttctcgctcttctagctctggtggcggcggctctggcggcggtggcgaaattgttctgacccaaagcccggcgaccctgagcctgagcccaggtgaacgcgccaccctgagctgtcgtgcctctcaaagcgtttcttctagctacctggcctggtatcaacagaaaccaggtcaggccccgcgcttactgatttatggtgcgtcttctcgcgcgacgggtatcccagcgcgtttttctggcagcggctctggcaccgatttcacgctgaccatttctcgcctggaaccagaggactttgccgtttattactgccaagcgtgggattctagcccattagttgtgtttggccaaggtacgaaggtggagattaaa

SEQ ID NO: 561 - DNA, 759 bp, synthetic construct
  source 1..759: mol_type = other DNA
caggtgcagttagttgaaagcggcggtggtgtggtgcaaccgggtcgtagcttacgtttatcttgcgcggcctctggctttacctttagcagctatgcgatgcattgggtgcgtcaggcgccaggtaagggcttagagtgggtggcggttatctcttatgacggtagcaacaagtactacgccgatagcgttaaaggccgcttcacgattagccgcgacaacagcaaaaataccttatacttacagatgaattctttacgcgccgaggatacggccgtttattattgtgcccgtcaccgcttctctggttctcaatatgcgttcttcgatccatggggccagtggggccaaggtacgctggtgaccgtgtcttctggtggttctagccgctctagcagcagcggtggcggcggtagcggcggcggtggcgaaatcgtgctgacccagagcccggcgaccttatctctgtctccaggcgaacgtgccaccttatcttgtcgtgcctctcaaagcgttagctctagctacctggcgtggtaccaacagaagccgggtcaagcgccgcgtttactgatctacggtgcgtcttctcgcgccaccggcattccagcgcgtttttctggcagcggctctggtaccgattttacgttaaccatttctcgcttagaaccagaggatttcgcggtttattattgtagctcttacacgagcagcagcacgttagttgtttttggtcagggcaccaaggttgagattaaa

SEQ ID NO: 562 - DNA, 753 bp, synthetic construct
  source 1..753: mol_type = other DNA
caggtgcagttagttgaaagcggcggtggtgtggtgcaaccgggtcgtagcttacgtttatcttgcgcggcctctggctttacctttagcagctatgcgatgcattgggtgcgtcaggcgccaggtaagggcttagagtgggtggcggttatctcttatgacggtagcaacaagtactacgccgatagcgttaaaggccgcttcacgattagccgcgacaacagcaaaaataccttatacttacagatgaattctttacgcgccgaggatacggccgtttattattgtgcccgtcaccgcggttctacgttatacgaaaattacatggacgtgtggggtcagtggggccagggtacgttagtgaccgtgagctctggtggttcttctcgttcttctagcagcggcggtggcggctctggcggcggcggtgaaattgttctgacccagagcccggcgaccctgtctttaagcccaggtgaacgtgcgacgctgtcttgtcgcgcgtctcaatctgtgtctagctcttatttagcgtggtatcaacaaaaaccaggccaagccccgcgtctgttaatttacggtgccagctctcgcgccacgggcattccggcccgttttagcggtagcggcagcggtacggattttaccttaacgattagccgcttagagccggaggactttgccgtgtactattgccaacagcacgagtactggccgctgaccttcggtcaaggtaccaaggtggaaattaaa

SEQ ID NO: 563 - DNA, 759 bp, synthetic construct
  source 1..759: mol_type = other DNA
caggtgcagttagttgaaagcggcggtggtgtggtgcaaccgggtcgtagcttacgtttatcttgcgcggcctctggctttacctttagcagctatgcgatgcattgggtgcgtcaggcgccaggtaagggcttagagtgggtggcggttatctcttatgacggtagcaacaagtactacgccgatagcgttaaaggccgcttcacgattagccgcgacaacagcaaaaataccttatacttacagatgaattctttacgcgccgaggatacggccgtttattattgtgcccgtcaccgcggtgttgccggttactatgcgtacttcgatccatggggccagtggggccaaggtacgctggtgaccgtgtcttctggtggttctagccgctctagcagcagcggtggcggcggtagcggcggcggtggcgaaatcgtgctgacccagagcccggcgaccttatctctgtctccaggcgaacgtgccaccttatcttgtcgtgcctctcaaagcgttagctctagctacctggcgtggtaccaacagaagccgggtcaagcgccgcgtttactgatctacggtgcgtcttctcgcgccaccggcattccagcgcgtttttctggcagcggctctggtaccgattttacgttaaccatttctcgcttagaaccagaggatttcgcggtttattattgtagctcttacacgagcagcagcacgttagttgtttttggtcagggcaccaaggttgagattaaa

SEQ ID NO: 564 - DNA, 771 bp, synthetic construct
  source 1..771: mol_type = other DNA
caggtgcagttagttgaaagcggcggtggtgtggtgcaaccgggtcgtagcttacgtttatcttgcgcggcctctggctttacctttagcagctatgcgatgcattgggtgcgtcaggcgccaggtaagggcttagagtgggtggcggttatctcttatgacggtagcaacaagtactacgccgatagcgttaaaggccgcttcacgattagccgcgacaacagcaaaaataccttatacttacagatgaattctttacgcgccgaggatacggccgtttattattgtgcccgtcaccgccgcttccgcggttctgattattactcttataactatccgatggatgtttggggtcaatggggccagggcaccttagttacggtttctagcggtggtagcagccgttctagcagctctggcggcggcggtagcggcggtggcggcgaaattgtgctgacccagtctccagcgacgttaagcctgagcccaggcgagcgcgccaccttatcttgtcgtgccagccaaagcgttagcagctcttacctggcctggtatcaacaaaaaccgggccaagcgccacgcttactgatctacggtgccagcagccgtgccaccggcattccagcgcgtttttctggtagcggcagcggtacggattttacgttaacgatttctcgcctggagccggaggattttgccgtgtactactgtcaggtgtgggattcttctgccttagtggtttttggccagggtacgaaggtggagatcaaa

SEQ ID NO: 565 - DNA, 750 bp, synthetic construct
  source 1..750: mol_type = other DNA
caggtgcagttagttgaaagcggcggtggtgtggtgcaaccgggtcgtagcttacgtttatcttgcgcggcctctggctttacctttagcagctatgcgatgcattgggtgcgtcaggcgccaggtaagggcttagagtgggtggcggttatctcttatgacggtagcaacaagtactacgccgatagcgttaaaggccgcttcacgattagccgcgacaacagcaaaaataccttatacttacagatgaattctttacgcgccgaggatacggccgtttattattgtgcccgtcaccgctctcaaggttacttcgatctgtggggtcaatggggccaaggcaccctggttacggttagcagcggcggctcttctcgctcttctagctctggtggcggcggctctggcggcggtggcgaaattgttctgacccaaagcccggcgaccctgagcctgagcccaggtgaacgcgccaccctgagctgtcgtgcctctcaaagcgtttcttctagctacctggcctggtatcaacagaaaccaggtcaggccccgcgcttactgatttatggtgcgtcttctcgcgcgacgggtatcccagcgcgtttttctggcagcggctctggcaccgatttcacgctgaccatttctcgcctggaaccagaggactttgccgtttattactgcggtacctgggattctagcttacgctctctggtggtgttcggtcaaggtaccaaggtggaaattaaa

SEQ ID NO: 566 - DNA, 744 bp, synthetic construct
  source 1..744: mol_type = other DNA
caggtgcagttagttgaaagcggcggtggtgtggtgcaaccgggtcgtagcttacgtttatcttgcgcggcctctggctttacctttagcagctatgcgatgcattgggtgcgtcaggcgccaggtaagggcttagagtgggtggcggttatctcttatgacggtagcaacaagtactacgccgatagcgttaaaggccgcttcacgattagccgcgacaacagcaaaaataccttatacttacagatgaattctttacgcgccgaggatacggccgtttattattgtgcccgtcaccgctctcaaggttacttcgatctgtggggtcaatggggccaaggcaccctggttacggttagcagcggcggctcttctcgctcttctagctctggtggcggcggctctggcggcggtggcgaaattgttctgacccaaagcccggcgaccctgagcctgagcccaggtgaacgcgccaccctgagctgtcgtgcctctcaaagcgtttcttctagctacctggcctggtatcaacagaaaccaggtcaggccccgcgcttactgatttatggtgcgtcttctcgcgcgacgggtatcccagcgcgtttttctggcagcggctctggcaccgatttcacgctgaccatttctcgcctggaaccagaggactttgccgtttattactgccaagcgtgggattctagcacgttcgttgtgtttggccaaggtacgaaggtggagattaaa

SEQ ID NO: 567 - DNA, 750 bp, synthetic construct
  source 1..750: mol_type = other DNA
caggtgcagttagttgaaagcggcggtggtgtggtgcaaccgggtcgtagcttacgtttatcttgcgcggcctctggctttacctttagcagctatgcgatgcattgggtgcgtcaggcgccaggtaagggcttagagtgggtggcggttatctcttatgacggtagcaacaagtactacgccgatagcgttaaaggccgcttcacgattagccgcgacaacagcaaaaataccttatacttacagatgaattctttacgcgccgaggatacggccgtttattattgtgcccgtcaccgcacgtctgccggtaagattgattactggggtcagtggggtcagggcaccttagttacggtgagcagcggcggttcttctcgctctagctcttctggcggcggcggtagcggcggtggcggcgaaatcgtgctgacgcagagcccggcgaccctgagcctgtctccaggcgagcgcgcgaccctgtcttgccgcgcctctcagtctgtttctagctcttatttagcgtggtaccagcagaagccaggccaagcgccacgcctgctgatttacggcgcctcttctcgtgccacgggtatcccggcgcgtttcagcggcagcggtagcggcaccgacttcaccctgaccatctctcgtctggagccagaggatttcgccgtgtactattgtggcacctgggacagctctgccccagcggtggtgttcggtcaaggtaccaaggtggaaattaaa

SEQ ID NO: 568 - DNA, 753 bp, synthetic construct
  source 1..753: mol_type = other DNA
caggtgcagttagttgaaagcggcggtggtgtggtgcaaccgggtcgtagcttacgtttatcttgcgcggcctctggctttacctttagcagctatgcgatgcattgggtgcgtcaggcgccaggtaagggcttagagtgggtggcggttatctcttatgacggtagcaacaagtactacgccgatagcgttaaaggccgcttcacgattagccgcgacaacagcaaaaataccttatacttacagatgaattctttacgcgccgaggatacggccgtttattattgtgcccgtcaccgcacgtctgccggtaagattgattactggggtcagtggggtcagggcaccttagttacggtgagcagcggcggttcttctcgctctagctcttctggcggcggcggtagcggcggtggcggcgaaatcgtgctgacgcagagcccggcgaccctgagcctgtctccaggcgagcgcgcgaccctgtcttgccgcgcctctcagtctgtttctagctcttatttagcgtggtaccagcagaagccaggccaagcgccacgcctgctgatttacggcgcctcttctcgtgccacgggtatcccggcgcgtttcagcggcagcggtagcggcaccgacttcaccctgaccatctctcgtctggagccagaggatttcgccgtgtactattgtggcacctgggacagctctttattaccgggctatgttttcggtcaaggcacgaaagtggaaatcaaa

SEQ ID NO: 569 - DNA, 753 bp, synthetic construct
  source 1..753: mol_type = other DNA
caggtgcagttagttgaaagcggcggtggtgtggtgcaaccgggtcgtagcttacgtttatcttgcgcggcctctggctttacctttagcagctatgcgatgcattgggtgcgtcaggcgccaggtaagggcttagagtgggtggcggttatctcttatgacggtagcaacaagtactacgccgatagcgttaaaggccgcttcacgattagccgcgacaacagcaaaaataccttatacttacagatgaattctttacgcgccgaggatacggccgtttattattgtgcccgtcaccgcacgtctgccggtaagattgattactggggtcagtggggtcagggcaccttagttacggtgagcagcggcggttcttctcgctctagctcttctggcggcggcggtagcggcggtggcggcgaaatcgtgctgacgcagagcccggcgaccctgagcctgtctccaggcgagcgcgcgaccctgtcttgccgcgcctctcagtctgtttctagctcttatttagcgtggtaccagcagaagccaggccaagcgccacgcctgctgatttacggcgcctcttctcgtgccacgggtatcccggcgcgtttcagcggcagcggtagcggcaccgacttcaccctgaccatctctcgtctggagccagaggatttcgccgtgtactattgtggcacctgggacagctctttacgcgtgagctatgttttcggtcaaggcacgaaagtggaaatcaaa

SEQ ID NO: 570 - DNA, 747 bp, synthetic construct
  source 1..747: mol_type = other DNA
caggtgcagttagttgaaagcggcggtggtgtggtgcaaccgggtcgtagcttacgtttatcttgcgcggcctctggctttacctttagcagctatgcgatgcattgggtgcgtcaggcgccaggtaagggcttagagtgggtggcggttatctcttatgacggtagcaacaagtactacgccgatagcgttaaaggccgcttcacgattagccgcgacaacagcaaaaataccttatacttacagatgaattctttacgcgccgaggatacggccgtttattattgtgcccgtcaccgcacgtctgccggtaagattgattactggggtcagtggggtcagggcaccttagttacggtgagcagcggcggttcttctcgctctagctcttctggcggcggcggtagcggcggtggcggcgaaatcgtgctgacgcagagcccggcgaccctgagcctgtctccaggcgagcgcgcgaccctgtcttgccgcgcctctcagtctgtttctagctcttatttagcgtggtaccagcagaagccaggccaagcgccacgcctgctgatttacggcgcctcttctcgtgccacgggtatcccggcgcgtttcagcggcagcggtagcggcaccgacttcaccctgaccatctctcgtctggagccagaggatttcgccgtgtactattgtcaggcgtgggacagctctacgttcgtggtgtttggtcaaggtacgaaagttgaaattaaa

SEQ ID NO: 571 - DNA, 747 bp, synthetic construct
  source 1..747: mol_type = other DNA
caggtgcagttagttgaaagcggcggtggtgtggtgcaaccgggtcgtagcttacgtttatcttgcgcggcctctggctttacctttagcagctatgcgatgcattgggtgcgtcaggcgccaggtaagggcttagagtgggtggcggttatctcttatgacggtagcaacaagtactacgccgatagcgttaaaggccgcttcacgattagccgcgacaacagcaaaaataccttatacttacagatgaattctttacgcgccgaggatacggccgtttattattgtgcccgtcaccgcacgtctgccggtaagattgattactggggtcagtggggtcagggcaccttagttacggtgagcagcggcggttcttctcgctctagctcttctggcggcggcggtagcggcggtggcggcgaaatcgtgctgacgcagagcccggcgaccctgagcctgtctccaggcgagcgcgcgaccctgtcttgccgcgcctctcagtctgtttctagctcttatttagcgtggtaccagcagaagccaggccaagcgccacgcctgctgatttacggcgcctcttctcgtgccacgggtatcccggcgcgtttcagcggcagcggtagcggcaccgacttcaccctgaccatctctcgtctggagccagaggatttcgccgtgtactattgtcaggcgtgggacagctctacgtacgtggtgtttggtcaaggtacgaaagttgaaattaaa

SEQ ID NO: 572 - DNA, 747 bp, synthetic construct
  source 1..747: mol_type = other DNA
caggtgcagttagttgaaagcggcggtggtgtggtgcaaccgggtcgtagcttacgtttatcttgcgcggcctctggctttacctttagcagctatgcgatgcattgggtgcgtcaggcgccaggtaagggcttagagtgggtggcggttatctcttatgacggtagcaacaagtactacgccgatagcgttaaaggccgcttcacgattagccgcgacaacagcaaaaataccttatacttacagatgaattctttacgcgccgaggatacggccgtttattattgtgcccgtcaccgcacgtctgccggtaagattgattactggggtcagtggggtcagggcaccttagttacggtgagcagcggcggttcttctcgctctagctcttctggcggcggcggtagcggcggtggcggcgaaatcgtgctgacgcagagcccggcgaccctgagcctgtctccaggcgagcgcgcgaccctgtcttgccgcgcctctcagtctgtttctagctcttatttagcgtggtaccagcagaagccaggccaagcgccacgcctgctgatttacggcgcctcttctcgtgccacgggtatcccggcgcgtttcagcggcagcggtagcggcaccgacttcaccctgaccatctctcgtctggagccagaggatttcgccgtgtactattgtcaggcgtgggacagcacgtctttagtggtgtttggtcaaggtacgaaagttgaaattaaa

SEQ ID NO: 573 - DNA, 747 bp, synthetic construct
  source 1..747: mol_type = other DNA
caggtgcagttagttgaaagcggcggtggtgtggtgcaaccgggtcgtagcttacgtttatcttgcgcggcctctggctttacctttagcagctatgcgatgcattgggtgcgtcaggcgccaggtaagggcttagagtgggtggcggttatctcttatgacggtagcaacaagtactacgccgatagcgttaaaggccgcttcacgattagccgcgacaacagcaaaaataccttatacttacagatgaattctttacgcgccgaggatacggccgtttattattgtgcccgtcaccgcacgtctgccggtaagattgattactggggtcagtggggtcagggcaccttagttacggtgagcagcggcggttcttctcgctctagctcttctggcggcggcggtagcggcggtggcggcgaaatcgtgctgacgcagagcccggcgaccctgagcctgtctccaggcgagcgcgcgaccctgtcttgccgcgcctctcagtctgtttctagctcttatttagcgtggtaccagcagaagccaggccaagcgccacgcctgctgatttacggcgcctcttctcgtgccacgggtatcccggcgcgtttcagcggcagcggtagcggcaccgacttcaccctgaccatctctcgtctggagccagaggatttcgccgtgtactattgtcaggcgtgggacagcacgacgttagtggtgtttggtcaaggtacgaaagttgaaattaaa

SEQ ID NO: 574 - DNA, 750 bp, synthetic construct
  source 1..750: mol_type = other DNA
caggtgcagttagttgaaagcggcggtggtgtggtgcaaccgggtcgtagcttacgtttatcttgcgcggcctctggctttacctttagcagctatgcgatgcattgggtgcgtcaggcgccaggtaagggcttagagtgggtggcggttatctcttatgacggtagcaacaagtactacgccgatagcgttaaaggccgcttcacgattagccgcgacaacagcaaaaataccttatacttacagatgaattctttacgcgccgaggatacggccgtttattattgtgcccgtcactctggtggttctttacgcggcatggatgtttggggtcagtggggtcagggcaccttagttacggtgagcagcggcggttcttctcgctctagctcttctggcggcggcggtagcggcggtggcggcgaaatcgtgctgacgcagagcccggcgaccctgagcctgtctccaggcgagcgcgcgaccctgtcttgccgcgcctctcagtctgtttctagctcttatttagcgtggtaccagcagaagccaggccaagcgccacgcctgctgatttacggcgcctcttctcgtgccacgggtatcccggcgcgtttcagcggcagcggtagcggcaccgacttcaccctgaccatctctcgtctggagccagaggatttcgccgtgtactattgtcagacctgggacattggtacgtacgtggtgtttggtcaaggtacgaaagttgaaattaaa

SEQ ID NO: 575 - DNA, 750 bp, synthetic construct
  source 1..750: mol_type = other DNA
caggtgcagttagttgaaagcggcggtggtgtggtgcaaccgggtcgtagcttacgtttatcttgcgcggcctctggctttacctttagcagctatgcgatgcattgggtgcgtcaggcgccaggtaagggcttagagtgggtggcggttatctcttatgacggtagcaacaagtactacgccgatagcgttaaaggccgcttcacgattagccgcgacaacagcaaaaataccttatacttacagatgaattctttacgcgccgaggatacggccgtttattattgtgcccgtcactcttcttactacggtaactttgatccatggggtcagtggggtcagggcaccttagttacggtgagcagcggcggttcttctcgctctagctcttctggcggcggcggtagcggcggtggcggcgaaatcgtgctgacgcagagcccggcgaccctgagcctgtctccaggcgagcgcgcgaccctgtcttgccgcgcctctcagtctgtttctagctcttatttagcgtggtaccagcagaagccaggccaagcgccacgcctgctgatttacggcgcctcttctcgtgccacgggtatcccggcgcgtttcagcggcagcggtagcggcaccgacttcaccctgaccatctctcgtctggagccagaggatttcgccgtgtactattgtgcggcgtgggacgattctttaaacggctatgtgttcggtcaaggtaccaaggtggaaattaaa

SEQ ID NO: 576 - DNA, 747 bp, synthetic construct
  source 1..747: mol_type = other DNA
caggtgcagttagttgaaagcggcggtggtgtggtgcaaccgggtcgtagcttacgtttatcttgcgcggcctctggctttacctttagcagctatgcgatgcattgggtgcgtcaggcgccaggtaagggcttagagtgggtggcggttatctcttatgacggtagcaacaagtactacgccgatagcgttaaaggccgcttcacgattagccgcgacaacagcaaaaataccttatacttacagatgaattctttacgcgccgaggatacggccgtttattattgtgcccgtcacacgggtgccatctacttcgcggattactggggtcagtggggtcagggcaccttagttacggtgagcagcggcggttcttctcgctctagctcttctggcggcggcggtagcggcggtggcggcgaaatcgtgctgacgcagagcccggcgaccctgagcctgtctccaggcgagcgcgcgaccctgtcttgccgcgcctctcagtctgtttctagctcttatttagcgtggtaccagcagaagccaggccaagcgccacgcctgctgatttacggcgcctcttctcgtgccacgggtatcccggcgcgtttcagcggcagcggtagcggcaccgacttcaccctgaccatctctcgtctggagccagaggatttcgccgtgtactattgtcagcagtacaataactggccaccatggacctttggccaaggtacgaaggtggagattaaa

SEQ ID NO: 577 - DNA, 753 bp, synthetic construct
  source 1..753: mol_type = other DNA
caggtgcagttagttgaaagcggcggtggtgtggtgcaaccgggtcgtagcttacgtttatcttgcgcggcctctggctttacctttagcagctatgcgatgcattgggtgcgtcaggcgccaggtaagggcttagagtgggtggcggttatctcttatgacggtagcaacaagtactacgccgatagcgttaaaggccgcttcacgattagccgcgacaacagcaaaaataccttatacttacagatgaattctttacgcgccgaggatacggccgtttattattgtgcccgtcacacgggtgactctcgcgttggcgtgatcgactattggggtcagtggggccagggtacgttagtgaccgtgagctctggtggttcttctcgttcttctagcagcggcggtggcggctctggcggcggcggtgaaattgttctgacccagagcccggcgaccctgtctttaagcccaggtgaacgtgcgacgctgtcttgtcgcgcgtctcaatctgtgtctagctcttatttagcgtggtatcaacaaaaaccaggccaagccccgcgtctgttaatttacggtgccagctctcgcgccacgggcattccggcccgttttagcggtagcggcagcggtacggattttaccttaacgattagccgcttagagccggaggactttgccgtgtactattgccaagcgtgggactcttctacctatgtggttttcggtcaaggcacgaaagtggaaatcaaa

SEQ ID NO: 578 - DNA, 762 bp, synthetic construct
  source 1..762: mol_type = other DNA
caggtgcagttagttgaaagcggcggtggtgtggtgcaaccgggtcgtagcttacgtttatcttgcgcggcctctggctttacctttagcagctatgcgatgcattgggtgcgtcaggcgccaggtaagggcttagagtgggtggcggttatctcttatgacggtagcaacaagtactacgccgatagcgttaaaggccgcttcacgattagccgcgacaacagcaaaaataccttatacttacagatgaattctttacgcgccgaggatacggccgtttattattgtgcccgtcacgttatcacgggttcttacggccagggtccatttgacgattggggccagtggggtcaaggtaccctggtgaccgtttcttctggtggtagctctcgcagcagcagctctggcggcggtggcagcggcggtggcggcgagattgtgctgacccagagcccggcgacgttaagcttatctccgggcgaacgcgcgacgttatcttgccgcgcctctcagtctgtgtctagctcttatctggcctggtaccagcaaaaaccaggtcaggcgccgcgcctgttaatctacggcgcctcttctcgcgcgaccggcatcccggcgcgtttcagcggcagcggttctggcaccgatttcacgctgaccatctctcgcctggagccagaagactttgccgtgtattactgccaagcctgggacagcagcagcacgcacgttgtttttggtcagggcaccaaggttgagattaaa

SEQ ID NO: 579 - DNA, 753 bp, synthetic construct
  source 1..753: mol_type = other DNA
caggtgcagttagttgaaagcggcggtggtgtggtgcaaccgggtcgtagcttacgtttatcttgcgcggcctctggctttacctttagcagctatgcgatgcattgggtgcgtcaggcgccaggtaagggcttagagtgggtggcggttatctcttatgacggtagcaacaagtactacgccgatagcgttaaaggccgcttcacgattagccgcgacaacagcaaaaataccttatacttacagatgaattctttacgcgccgaggatacggccgtttattattgtgcccgtcactggggtttccgctacttcgacttttggggccaatggggtcagggtaccctggtgacggtttctagcggcggcagctctcgctcttcttctagcggtggtggcggcagcggtggcggcggtgaaattgtgttaacccagtctccggcgaccctgagcctgagcccgggtgagcgtgccacgctgagctgccgcgcgtctcaatctgtgtcttcttcttatttagcgtggtaccagcaaaaaccgggtcaagcgccacgtttattaatttatggcgccagctctcgcgccaccggtatcccagcccgttttagcggtagcggcagcggtaccgattttacgttaaccattagccgcttagaaccggaggacttcgcggtttactattgtggcgcctatacccgcgcgaacccacaaaccctgtatgttttcggtcaaggcacgaaagtggaaatcaaa

SEQ ID NO: 580 - DNA, 759 bp, synthetic construct
  source 1..759: mol_type = other DNA
caggtgcagttagttgaaagcggcggtggtgtggtgcaaccgggtcgtagcttacgtttatcttgcgcggcctctggctttacctttagcagctatgcgatgcattgggtgcgtcaggcgccaggtaagggcttagagtgggtggcggttatctcttatgacggtagcaacaagtactacgccgatagcgttaaaggccgcttcacgattagccgcgacaacagcaaaaataccttatacttacagatgaattctttacgcgccgaggatacggccgtttattattgtgcccgtcactactctcgcacgtctgccccgtattacaacgcggttgatgtgtggggccaatggggtcaaggcaccctggtgacggtttcttctggtggctcttctcgtagcagctctagcggcggtggcggcagcggtggcggcggtgaaattgtgctgacccagagcccggccacgctgtctttaagcccgggcgagcgtgccacgttaagctgtcgcgccagccaaagcgttagctctagctatttagcctggtatcaacagaagccaggccaggcgccacgtttattaatctatggtgcctcttctcgtgcgaccggtattccggcgcgctttagcggctctggtagcggcaccgacttcaccctgacgatctctcgtttagagccggaggatttcgcggtgtactattgtcaacaaagctatagcccaccattaacgtttggtcagggcaccaaggttgagattaaa

SEQ ID NO: 581 - DNA, 741 bp, synthetic construct
  source 1..741: mol_type = other DNA
caggtgcagttagttgaaagcggcggtggtgtggtgcaaccgggtcgtagcttacgtttatcttgcgcggcctctggctttacctttagcagctatgcgatgcattgggtgcgtcaggcgccaggtaagggcttagagtgggtggcggttatctcttatgacggtagcaacaagtactacgccgatagcgttaaaggccgcttcacgattagccgcgacaacagcaaaaataccttatacttacagatgaattctttacgcgccgaggatacggccgtttattattgtgcccgtatcaaccgcgttcgcacgttcgatatttggggtcaatggggccaaggcaccctggttacggttagcagcggcggctcttctcgctcttctagctctggtggcggcggctctggcggcggtggcgaaattgttctgacccaaagcccggcgaccctgagcctgagcccaggtgaacgcgccaccctgagctgtcgtgcctctcaaagcgtttcttctagctacctggcctggtatcaacagaaaccaggtcaggccccgcgcttactgatttatggtgcgtcttctcgcgcgacgggtatcccagcgcgtttttctggcagcggctctggcaccgatttcacgctgaccatttctcgcctggaaccagaggactttgccgtttattactgccaacaggcgaacagcttcccaccaacctttggccaaggtacgaaggtggagattaaa

SEQ ID NO: 582 - DNA, 771 bp, synthetic construct; identical to SEQ ID NO: 55
  source 1..771: mol_type = other DNA

SEQ ID NO: 583 - DNA, 741 bp, synthetic construct
  source 1..741: mol_type = other DNA
caggtgcagttagttgaaagcggcggtggtgtggtgcaaccgggtcgtagcttacgtttatcttgcgcggcctctggctttacctttagcagctatgcgatgcattgggtgcgtcaggcgccaggtaagggcttagagtgggtggcggttatctcttatgacggtagcaacaagtactacgccgatagcgttaaaggccgcttcacgattagccgcgacaacagcaaaaataccttatacttacagatgaattctttacgcgccgaggatacggccgtttattattgtgcccgtttaaaccgcttattcgccttagatccgtggggtcaatggggccaaggcaccctggttacggttagcagcggcggctcttctcgctcttctagctctggtggcggcggctctggcggcggtggcgaaattgttctgacccaaagcccggcgaccctgagcctgagcccaggtgaacgcgccaccctgagctgtcgtgcctctcaaagcgtttcttctagctacctggcctggtatcaacagaaaccaggtcaggccccgcgcttactgatttatggtgcgtcttctcgcgcgacgggtatcccagcgcgtttttctggcagcggctctggcaccgatttcacgctgaccatttctcgcctggaaccagaggactttgccgtttattactgccaaacctgggattctagcggtgttgtttttggccagggtacgaaggttgaaatcaaa

SEQ ID NO: 584 - DNA, 750 bp, synthetic construct
  source 1..750: mol_type = other DNA
caggtgcagttagttgaaagcggcggtggtgtggtgcaaccgggtcgtagcttacgtttatcttgcgcggcctctggctttacctttagcagctatgcgatgcattgggtgcgtcaggcgccaggtaagggcttagagtgggtggcggttatctcttatgacggtagcaacaagtactacgccgatagcgttaaaggccgcttcacgattagccgcgacaacagcaaaaataccttatacttacagatgaattctttacgcgccgaggatacggccgtttattattgtgcccgtttaccagccggtatcgacgccggctttgacttatggggccaatggggccagggcacgttagttaccgtgagcagcggtggttcttctcgcagctcttctagcggcggcggtggcagcggtggcggcggcgagattgtgttaacccagagcccggcgaccctgagcttatctccgggtgagcgtgcgaccttaagctgtcgcgccagccaatctgttagctctagctacctggcctggtatcagcaaaagccgggtcaggccccacgtctgctgatctatggtgcctctagccgcgccacgggtattccggcgcgctttagcggctctggcagcggcacggactttaccctgacgatcagccgtttagagccagaagacttcgcggtttattactgcgaatcttgggatgacaaggcctattgggtgtttggtcaaggtacgaaagttgaaattaaa

SEQ ID NO: 585 - DNA, 765 bp, synthetic construct
  source 1..765: mol_type = other DNA
caggtgcagttagttgaaagcggcggtggtgtggtgcaaccgggtcgtagcttacgtttatcttgcgcggcctctggctttacctttagcagctatgcgatgcattgggtgcgtcaggcgccaggtaagggcttagagtgggtggcggttatctcttatgacggtagcaacaagtactacgccgatagcgttaaaggccgcttcacgattagccgcgacaacagcaaaaataccttatacttacagatgaattctttacgcgccgaggatacggccgtttattattgtgcccgtttaccaggtgccacgtctaagagctggtattacacgcgtggttttgattattggggtcaatggggtcagggcaccctggttacggtttcttctggcggttctagccgtagctctagcagcggtggcggcggctctggcggcggtggcgaaattgtgctgacccagagcccagccaccttatctctgagcccgggtgaacgcgccacgctgtcttgtcgcgcgtctcagtctgtgtctagcagctacttagcgtggtaccagcaaaagccgggccaggccccgcgcttattaatttacggtgcctctagccgtgcgacgggcattccggcccgttttagcggttctggcagcggcacggactttaccttaacgatcagccgcttagaaccagaagactttgcggtttattactgtcaaacctggggcaccggttctttagtttttggtcagggcaccaaggttgagattaaa

SEQ ID NO: 586 - DNA, 753 bp, synthetic construct
  source 1..753: mol_type = other DNA
caggtgcagttagttgaaagcggcggtggtgtggtgcaaccgggtcgtagcttacgtttatcttgcgcggcctctggctttacctttagcagctatgcgatgcattgggtgcgtcaggcgccaggtaagggcttagagtgggtggcggttatctcttatgacggtagcaacaagtactacgccgatagcgttaaaggccgcttcacgattagccgcgacaacagcaaaaataccttatacttacagatgaattctttacgcgccgaggatacggccgtttattattgtgcccgtttacgcggttcttacgactacgaagcgttcgactattggggtcagtggggccagggtacgttagtgaccgtgagctctggtggttcttctcgttcttctagcagcggcggtggcggctctggcggcggcggtgaaattgttctgacccagagcccggcgaccctgtctttaagcccaggtgaacgtgcgacgctgtcttgtcgcgcgtctcaatctgtgtctagctcttatttagcgtggtatcaacaaaaaccaggccaagccccgcgtctgttaatttacggtgccagctctcgcgccacgggcattccggcccgttttagcggtagcggcagcggtacggattttaccttaacgattagccgcttagagccggaggactttgccgtgtactattgccaacagtacaacaactggccgcgttatacgttcggtcaaggcacgaaagtggaaatcaaa

SEQ ID NO: 587 - DNA, 753 bp, synthetic construct
  source 1..753: mol_type = other DNA
caggtgcagttagttgaaagcggcggtggtgtggtgcaaccgggtcgtagcttacgtttatcttgcgcggcctctggctttacctttagcagctatgcgatgcattgggtgcgtcaggcgccaggtaagggcttagagtgggtggcggttatctcttatgacggtagcaacaagtactacgccgatagcgttaaaggccgcttcacgattagccgcgacaacagcaaaaataccttatacttacagatgaattctttacgcgccgaggatacggccgtttattattgtgcccgtttacgcggttcttactaccgcaattggtttgacccatggggccaatggggccagggcacgttagttaccgtgagcagcggtggttcttctcgcagctcttctagcggcggcggtggcagcggtggcggcggcgagattgtgttaacccagagcccggcgaccctgagcttatctccgggtgagcgtgcgaccttaagctgtcgcgccagccaatctgttagctctagctacctggcctggtatcagcaaaagccgggtcaggccccacgtctgctgatctatggtgcctctagccgcgccacgggtattccggcgcgctttagcggctctggcagcggcacggactttaccctgacgatcagccgtttagagccagaagacttcgcggtttattactgcgcgtcttttgacttagacgcgctgtgggtgttcggtcaaggtaccaaggtggaaattaaa

SEQ ID NO: 588 - DNA, 741 bp, synthetic construct
  source 1..741: mol_type = other DNA
caggtgcagttagttgaaagcggcggtggtgtggtgcaaccgggtcgtagcttacgtttatcttgcgcggcctctggctttacctttagcagctatgcgatgcattgggtgcgtcaggcgccaggtaagggcttagagtgggtggcggttatctcttatgacggtagcaacaagtactacgccgatagcgttaaaggccgcttcacgattagccgcgacaacagcaaaaataccttatacttacagatgaattctttacgcgccgaggatacggccgtttattattgtgcccgtttaacgccaggtttcgactactggggccagtggggtcaaggcacgctggtgaccgtttcttctggcggcagcagccgctcttcttcttctggcggtggtggcagcggcggtggcggcgagattgtgctgacgcagagcccagcgaccctgagcctgagcccgggcgagcgcgcgacgttaagctgccgtgccagccaatctgttagctcttcttacctggcctggtatcaacagaagccgggccaagccccgcgcctgttaatctatggcgcgtctagccgcgccacgggcatcccagcccgctttagcggctctggcagcggcacggattttaccttaacgattagccgtttagagccggaagacttcgccgtgtactactgccaagtgtgggacagccgtgccgatcactgggttttcggccagggcacgaaggttgagattaaa

SEQ ID NO: 589 - DNA, 747 bp, synthetic construct
  source 1..747: mol_type = other DNA
caggtgcagttagttgaaagcggcggtggtgtggtgcaaccgggtcgtagcttacgtttatcttgcgcggcctctggctttacctttagcagctatgcgatgcattgggtgcgtcaggcgccaggtaagggcttagagtgggtggcggttatctcttatgacggtagcaacaagtactacgccgatagcgttaaaggccgcttcacgattagccgcgacaacagcaaaaataccttatacttacagatgaattctttacgcgccgaggatacggccgtttattattgtgcccgtatgggtacgatcccacgccaccactttgattactggggtcagtggggtcagggcaccttagttacggtgagcagcggcggttcttctcgctctagctcttctggcggcggcggtagcggcggtggcggcgaaatcgtgctgacgcagagcccggcgaccctgagcctgtctccaggcgagcgcgcgaccctgtcttgccgcgcctctcagtctgtttctagctcttatttagcgtggtaccagcagaagccaggccaagcgccacgcctgctgatttacggcgcctcttctcgtgccacgggtatcccggcgcgtttcagcggcagcggtagcggcaccgacttcaccctgaccatctctcgtctggagccagaggatttcgccgtgtactattgtcagcagtacgataacccaccagtgagctttggtcaaggtacgaaagttgaaattaaa

SEQ ID NO: 590 - DNA, 744 bp, synthetic construct
  source 1..744: mol_type = other DNA
caggtgcagttagttgaaagcggcggtggtgtggtgcaaccgggtcgtagcttacgtttatcttgcgcggcctctggctttacctttagcagctatgcgatgcattgggtgcgtcaggcgccaggtaagggcttagagtgggtggcggttatctcttatgacggtagcaacaagtactacgccgatagcgttaaaggccgcttcacgattagccgcgacaacagcaaaaataccttatacttacagatgaattctttacgcgccgaggatacggccgtttattattgtgcccgtatgcaacgctacggtatggacgtttggggtcagtggggccaaggtaccttagtgaccgtgtcttctggtggcagcagccgttcttcttcttctggtggcggtggtagcggcggcggtggcgaaatcgtgctgacccaaagcccggccaccctgagcctgagcccgggcgaacgcgccaccttatcttgccgtgcgtctcagtctgtttctagctcttacttagcgtggtaccagcaaaaaccaggccaggccccacgtttactgatctacggcgcgagctctcgtgccacgggtattccagcccgcttcagcggcagcggtagcggcaccgactttaccctgacgatcagccgtctggagccagaagatttcgccgtttattactgtggcacgtgggattctagcctgaacccggttgttttcggccagggcacgaaggttgagattaaa

SEQ ID NO: 591 - DNA, 747 bp, synthetic construct
  source 1..747: mol_type = other DNA
caggtgcagttagttgaaagcggcggtggtgtggtgcaaccgggtcgtagcttacgtttatcttgcgcggcctctggctttacctttagcagctatgcgatgcattgggtgcgtcaggcgccaggtaagggcttagagtgggtggcggttatctcttatgacggtagcaacaagtactacgccgatagcgttaaaggccgcttcacgattagccgcgacaacagcaaaaataccttatacttacagatgaattctttacgcgccgaggatacggccgtttattattgtgcccgtatgcaacgctacggtatggacgtttggggtcagtggggccaaggtaccttagtgaccgtgtcttctggtggcagcagccgttcttcttcttctggtggcggtggtagcggcggcggtggcgaaatcgtgctgacccaaagcccggccaccctgagcctgagcccgggcgaacgcgccaccttatcttgccgtgcgtctcagtctgtttctagctcttacttagcgtggtaccagcaaaaaccaggccaggccccacgtttactgatctacggcgcgagctctcgtgccacgggtattccagcccgcttcagcggcagcggtagcggcaccgactttaccctgacgatcagccgtctggagccagaagatttcgccgtttattactgtggcacgtgggattctagcctgtctgcggttgccgtttttggccagggtacgaaggttgaaatcaaa

SEQ ID NO: 592 - DNA, 747 bp, synthetic construct
  source 1..747: mol_type = other DNA
caggtgcagttagttgaaagcggcggtggtgtggtgcaaccgggtcgtagcttacgtttatcttgcgcggcctctggctttacctttagcagctatgcgatgcattgggtgcgtcaggcgccaggtaagggcttagagtgggtggcggttatctcttatgacggtagcaacaagtactacgccgatagcgttaaaggccgcttcacgattagccgcgacaacagcaaaaataccttatacttacagatgaattctttacgcgccgaggatacggccgtttattattgtgcccgtatgcaacgctacggtatggacgtttggggtcagtggggccaaggtaccttagtgaccgtgtcttctggtggcagcagccgttcttcttcttctggtggcggtggtagcggcggcggtggcgaaatcgtgctgacccaaagcccggccaccctgagcctgagcccgggcgaacgcgccaccttatcttgccgtgcgtctcagtctgtttctagctcttacttagcgtggtaccagcaaaaaccaggccaggccccacgtttactgatctacggcgcgagctctcgtgccacgggtattccagcccgcttcagcggcagcggtagcggcaccgactttaccctgacgatcagccgtctggagccagaagatttcgccgtttattactgtggcacgtgggattctagcagctctcatttaaaggtttttggccagggtacgaaggttgaaatcaaa

SEQ ID NO: 593 - DNA, 732 bp, synthetic construct
  source 1..732: mol_type = other DNA
caggtgcagttagttgaaagcggcggtggtgtggtgcaaccgggtcgtagcttacgtttatcttgcgcggcctctggctttacctttagcagctatgcgatgcattgggtgcgtcaggcgccaggtaagggcttagagtgggtggcggttatctcttatgacggtagcaacaagtactacgccgatagcgttaaaggccgcttcacgattagccgcgacaacagcaaaaataccttatacttacagatgaattctttacgcgccgaggatacggccgtttattattgtgcccgtatgcaacgctacggtatggacgtttggggtcagtggggccaaggtaccttagtgaccgtgtcttctggtggcagcagccgttcttcttcttctggtggcggtggtagcggcggcggtggcgaaatcgtgctgacccaaagcccggccaccctgagcctgagcccgggcgaacgcgccaccttatcttgccgtgcgtctcagtctgtttctagctcttacttagcgtggtaccagcaaaaaccaggccaggccccacgtttactgatctacggcgcgagctctcgtgccacgggtattccagcccgcttcagcggcagcggtagcggcaccgactttaccctgacgatcagccgtctggagccagaagatttcgccgtttattactgtcagacgtggggcacggtggtgttcggccaaggtacgaaagtggaaatcaaa

SEQ ID NO: 594 - DNA, 735 bp, synthetic construct
  source 1..735: mol_type = other DNA
caggtgcagttagttgaaagcggcggtggtgtggtgcaaccgggtcgtagcttacgtttatcttgcgcggcctctggctttacctttagcagctatgcgatgcattgggtgcgtcaggcgccaggtaagggcttagagtgggtggcggttatctcttatgacggtagcaacaagtactacgccgatagcgttaaaggccgcttcacgattagccgcgacaacagcaaaaataccttatacttacagatgaattctttacgcgccgaggatacggccgtttattattgtgcccgtatgcgcccagagttagactactggggtcagtggggccaaggtaccttagtgaccgtgtcttctggtggcagcagccgttcttcttcttctggtggcggtggtagcggcggcggtggcgaaatcgtgctgacccaaagcccggccaccctgagcctgagcccgggcgaacgcgccaccttatcttgccgtgcgtctcagtctgtttctagctcttacttagcgtggtaccagcaaaaaccaggccaggccccacgtttactgatctacggcgcgagctctcgtgccacgggtattccagcccgcttcagcggcagcggtagcggcaccgactttaccctgacgatcagccgtctggagccagaagatttcgccgtttattactgtcagacgtgggattctagcaccgttgtgttcggtcaaggcaccaaagttgagatcaaa

SEQ ID NO: 595 - DNA, 747 bp, synthetic construct
  source 1..747: mol_type = other DNA
caggtgcagttagttgaaagcggcggtggtgtggtgcaaccgggtcgtagcttacgtttatcttgcgcggcctctggctttacctttagcagctatgcgatgcattgggtgcgtcaggcgccaggtaagggcttagagtgggtggcggttatctcttatgacggtagcaacaagtactacgccgatagcgttaaaggccgcttcacgattagccgcgacaacagcaaaaataccttatacttacagatgaattctttacgcgccgaggatacggccgtttattattgtgcccgtatgcgccgctcttcttacttcgactattggggccaatggggtcagggtaccctggtgacggtttctagcggcggcagctctcgctcttcttctagcggtggtggcggcagcggtggcggcggtgaaattgtgttaacccagtctccggcgaccctgagcctgagcccgggtgagcgtgccacgctgagctgccgcgcgtctcaatctgtgtcttcttcttatttagcgtggtaccagcaaaaaccgggtcaagcgccacgtttattaatttatggcgccagctctcgcgccaccggtatcccagcccgttttagcggtagcggcagcggtaccgattttacgttaaccattagccgcttagaaccggaggacttcgcggtttactattgtagctcttatacctctagctcttctttatgggtgtttggccaaggtacgaaggtggagattaaa

SEQ ID NO: 596 - DNA, 744 bp, synthetic construct
  source 1..744: mol_type = other DNA
caggtgcagttagttgaaagcggcggtggtgtggtgcaaccgggtcgtagcttacgtttatcttgcgcggcctctggctttacctttagcagctatgcgatgcattgggtgcgtcaggcgccaggtaagggcttagagtgggtggcggttatctcttatgacggtagcaacaagtactacgccgatagcgttaaaggccgcttcacgattagccgcgacaacagcaaaaataccttatacttacagatgaattctttacgcgccgaggatacggccgtttattattgtgcccgtatgcgctctggtggttggttcgactactggggccagtggggtcaaggcacgctggtgaccgtttcttctggcggcagcagccgctcttcttcttctggcggtggtggcagcggcggtggcggcgagattgtgctgacgcagagcccagcgaccctgagcctgagcccgggcgagcgcgcgacgttaagctgccgtgccagccaatctgttagctcttcttacctggcctggtatcaacagaagccgggccaagccccgcgcctgttaatctatggcgcgtctagccgcgccacgggcatcccagcccgctttagcggctctggcagcggcacggattttaccttaacgattagccgtttagagccggaagacttcgccgtgtactactgccaagcgtgggacagcagcccaagcgttgttttcggccagggcacgaaggttgagattaaa

SEQ ID NO: 597 - DNA, 741 bp, synthetic construct
  source 1..741: mol_type = other DNA
caggtgcagttagttgaaagcggcggtggtgtggtgcaaccgggtcgtagcttacgtttatcttgcgcggcctctggctttacctttagcagctatgcgatgcattgggtgcgtcaggcgccaggtaagggcttagagtgggtggcggttatctcttatgacggtagcaacaagtactacgccgatagcgttaaaggccgcttcacgattagccgcgacaacagcaaaaataccttatacttacagatgaattctttacgcgccgaggatacggccgtttattattgtgcccgtatgcgctctggtggttggttcgactactggggccagtggggtcaaggcacgctggtgaccgtttcttctggcggcagcagccgctcttcttcttctggcggtggtggcagcggcggtggcggcgagattgtgctgacgcagagcccagcgaccctgagcctgagcccgggcgagcgcgcgacgttaagctgccgtgccagccaatctgttagctcttcttacctggcctggtatcaacagaagccgggccaagccccgcgcctgttaatctatggcgcgtctagccgcgccacgggcatcccagcccgctttagcggctctggcagcggcacggattttaccttaacgattagccgtttagagccggaagacttcgccgtgtactactgccaaacctgggccagcagcggttgggtgttcggtcaaggcaccaaagttgagatcaaa

SEQ ID NO: 598 - DNA, 744 bp, synthetic construct
  source 1..744: mol_type = other DNA
caggtgcagttagttgaaagcggcggtggtgtggtgcaaccgggtcgtagcttacgtttatcttgcgcggcctctggctttacctttagcagctatgcgatgcattgggtgcgtcaggcgccaggtaagggcttagagtgggtggcggttatctcttatgacggtagcaacaagtactacgccgatagcgttaaaggccgcttcacgattagccgcgacaacagcaaaaataccttatacttacagatgaattctttacgcgccgaggatacggccgtttattattgtgcccgtatgtctgccggtggtaagttagactattggggccaatggggtcagggtaccctggtgacggtttctagcggcggcagctctcgctcttcttctagcggtggtggcggcagcggtggcggcggtgaaattgtgttaacccagtctccggcgaccctgagcctgagcccgggtgagcgtgccacgctgagctgccgcgcgtctcaatctgtgtcttcttcttatttagcgtggtaccagcaaaaaccgggtcaagcgccacgtttattaatttatggcgccagctctcgcgccaccggtatcccagcccgttttagcggtagcggcagcggtaccgattttacgttaaccattagccgcttagaaccggaggacttcgcggtttactattgtcagtctgtggattctagcggtacgtgggtttttggccagggtacgaaggttgaaatcaaa

SEQ ID NO: 599 - DNA, 747 bp, synthetic construct
  source 1..747: mol_type = other DNA
caggtgcagttagttgaaagcggcggtggtgtggtgcaaccgggtcgtagcttacgtttatcttgcgcggcctctggctttacctttagcagctatgcgatgcattgggtgcgtcaggcgccaggtaagggcttagagtgggtggcggttatctcttatgacggtagcaacaagtactacgccgatagcgttaaaggccgcttcacgattagccgcgacaacagcaaaaataccttatacttacagatgaattctttacgcgccgaggatacggccgtttattattgtgcccgtaacggtcgcacggttacgaagggcatggatgtttggggtcagtggggtcagggcaccttagttacggtgagcagcggcggttcttctcgctctagctcttctggcggcggcggtagcggcggtggcggcgaaatcgtgctgacgcagagcccggcgaccctgagcctgtctccaggcgagcgcgcgaccctgtcttgccgcgcctctcagtctgtttctagctcttatttagcgtggtaccagcagaagccaggccaagcgccacgcctgctgatttacggcgcctcttctcgtgccacgggtatcccggcgcgtttcagcggcagcggtagcggcaccgacttcaccctgaccatctctcgtctggagccagaggatttcgccgtgtactattgtcagcaggttaattctttcccaccgacctttggtcaaggtacgaaagttgaaattaaa

SEQ ID NO: 600 - DNA, 750 bp, synthetic construct
  source 1..750: mol_type = other DNA
caggtgcagttagttgaaagcggcggtggtgtggtgcaaccgggtcgtagcttacgtttatcttgcgcggcctctggctttacctttagcagctatgcgatgcattgggtgcgtcaggcgccaggtaagggcttagagtgggtggcggttatctcttatgacggtagcaacaagtactacgccgatagcgttaaaggccgcttcacgattagccgcgacaacagcaaaaataccttatacttacagatgaattctttacgcgccgaggatacggccgtttattattgtgcccgtaacggtcgcacggttacgaagggcatggatgtttggggtcagtggggtcagggcaccttagttacggtgagcagcggcggttcttctcgctctagctcttctggcggcggcggtagcggcggtggcggcgaaatcgtgctgacgcagagcccggcgaccctgagcctgtctccaggcgagcgcgcgaccctgtcttgccgcgcctctcagtctgtttctagctcttatttagcgtggtaccagcagaagccaggccaagcgccacgcctgctgatttacggcgcctcttctcgtgccacgggtatcccggcgcgtttcagcggcagcggtagcggcaccgacttcaccctgaccatctctcgtctggagccagaggatttcgccgtgtactattgtcagcagtacgattcttctccaccgattaccttcggtcaaggtaccaaggtggaaattaaa

SEQ ID NO: 601 - DNA, 744 bp, synthetic construct
  source 1..744: mol_type = other DNA
caggtgcagttagttgaaagcggcggtggtgtggtgcaaccgggtcgtagcttacgtttatcttgcgcggcctctggctttacctttagcagctatgcgatgcattgggtgcgtcaggcgccaggtaagggcttagagtgggtggcggttatctcttatgacggtagcaacaagtactacgccgatagcgttaaaggccgcttcacgattagccgcgacaacagcaaaaataccttatacttacagatgaattctttacgcgccgaggatacggccgtttattattgtgcccgtaaccgcggttggacgggttctttcgatctgtggggtcaatggggccaaggcaccctggttacggttagcagcggcggctcttctcgctcttctagctctggtggcggcggctctggcggcggtggcgaaattgttctgacccaaagcccggcgaccctgagcctgagcccaggtgaacgcgccaccctgagctgtcgtgcctctcaaagcgtttcttctagctacctggcctggtatcaacagaaaccaggtcaggccccgcgcttactgatttatggtgcgtcttctcgcgcgacgggtatcccagcgcgtttttctggcagcggctctggcaccgatttcacgctgaccatttctcgcctggaaccagaggactttgccgtttattactgccaacagagcaacagcccaccaatcacctttggccaaggtacgaaggtggagattaaa

SEQ ID NO: 602 - DNA, 750 bp, synthetic construct
  source 1..750: mol_type = other DNA
caggtgcagttagttgaaagcggcggtggtgtggtgcaaccgggtcgtagcttacgtttatcttgcgcggcctctggctttacctttagcagctatgcgatgcattgggtgcgtcaggcgccaggtaagggcttagagtgggtggcggttatctcttatgacggtagcaacaagtactacgccgatagcgttaaaggccgcttcacgattagccgcgacaacagcaaaaataccttatacttacagatgaattctttacgcgccgaggatacggccgtttattattgtgcccgtaaccgccgcttatctccaggtggcggcttcgacatttggggtcagtggggccagggtacgttagtgaccgtgagctctggtggttcttctcgttcttctagcagcggcggtggcggctctggcggcggcggtgaaattgttctgacccagagcccggcgaccctgtctttaagcccaggtgaacgtgcgacgctgtcttgtcgcgcgtctcaatctgtgtctagctcttatttagcgtggtatcaacaaaaaccaggccaagccccgcgtctgttaatttacggtgccagctctcgcgccacgggcattccggcccgttttagcggtagcggcagcggtacggattttaccttaacgattagccgcttagagccggaggactttgccgtgtactattgccaacagtctgactctccgccgattacgttcggtcaaggcacgaaagtggaaatcaaa

SEQ ID NO: 603 - DNA, 750 bp, synthetic construct
  source 1..750: mol_type = other DNA
caggtgcagttagttgaaagcggcggtggtgtggtgcaaccgggtcgtagcttacgtttatcttgcgcggcctctggctttacctttagcagctatgcgatgcattgggtgcgtcaggcgccaggtaagggcttagagtgggtggcggttatctcttatgacggtagcaacaagtactacgccgatagcgttaaaggccgcttcacgattagccgcgacaacagcaaaaataccttatacttacagatgaattctttacgcgccgaggatacggccgtttattattgtgcccgtaaccgccgcttatctccaggtggcggcttcgacatttggggtcagtggggccagggtacgttagtgaccgtgagctctggtggttcttctcgttcttctagcagcggcggtggcggctctggcggcggcggtgaaattgttctgacccagagcccggcgaccctgtctttaagcccaggtgaacgtgcgacgctgtcttgtcgcgcgtctcaatctgtgtctagctcttatttagcgtggtatcaacaaaaaccaggccaagccccgcgtctgttaatttacggtgccagctctcgcgccacgggcattccggcccgttttagcggtagcggcagcggtacggattttaccttaacgattagccgcttagagccggaggactttgccgtgtactattgccaacagtcttactctccgccgccgacgttcggtcaaggcacgaaagtggaaatcaaa

SEQ ID NO: 604 - DNA, 750 bp, synthetic construct
  source 1..750: mol_type = other DNA
caggtgcagttagttgaaagcggcggtggtgtggtgcaaccgggtcgtagcttacgtttatcttgcgcggcctctggctttacctttagcagctatgcgatgcattgggtgcgtcaggcgccaggtaagggcttagagtgggtggcggttatctcttatgacggtagcaacaagtactacgccgatagcgttaaaggccgcttcacgattagccgcgacaacagcaaaaataccttatacttacagatgaattctttacgcgccgaggatacggccgtttattattgtgcccgtaactctggtcaaggtgacttaaatccgtggggtcaatggggccaaggcaccctggttacggttagcagcggcggctcttctcgctcttctagctctggtggcggcggctctggcggcggtggcgaaattgttctgacccaaagcccggcgaccctgagcctgagcccaggtgaacgcgccaccctgagctgtcgtgcctctcaaagcgtttcttctagctacctggcctggtatcaacagaaaccaggtcaggccccgcgcttactgatttatggtgcgtcttctcgcgcgacgggtatcccagcgcgtttttctggcagcggctctggcaccgatttcacgctgaccatttctcgcctggaaccagaggactttgccgtttattactgcggtacctgggatgttagctctgacccagcgtgggtgtttggtcaaggtacgaaagttgaaattaaa

SEQ ID NO: 605 - DNA, 744 bp, synthetic construct
  source 1..744: mol_type = other DNA
caggtgcagttagttgaaagcggcggtggtgtggtgcaaccgggtcgtagcttacgtttatcttgcgcggcctctggctttacctttagcagctatgcgatgcattgggtgcgtcaggcgccaggtaagggcttagagtgggtggcggttatctcttatgacggtagcaacaagtactacgccgatagcgttaaaggccgcttcacgattagccgcgacaacagcaaaaataccttatacttacagatgaattctttacgcgccgaggatacggccgtttattattgtgcccgtaactctggttggtacggtgtttcttggggccagtggggtcaaggcacgctggtgaccgtttcttctggcggcagcagccgctcttcttcttctggcggtggtggcagcggcggtggcggcgagattgtgctgacgcagagcccagcgaccctgagcctgagcccgggcgagcgcgcgacgttaagctgccgtgccagccaatctgttagctcttcttacctggcctggtatcaacagaagccgggccaagccccgcgcctgttaatctatggcgcgtctagccgcgccacgggcatcccagcccgctttagcggctctggcagcggcacggattttaccttaacgattagccgtttagagccggaagacttcgccgtgtactactgccaagtgtgggacagcagctctgatcaatgggttttcggccagggcacgaaggttgagattaaa

SEQ ID NO: 606 - DNA, 738 bp, synthetic construct
  source 1..738: mol_type = other DNA
caggtgcagttagttgaaagcggcggtggtgtggtgcaaccgggtcgtagcttacgtttatcttgcgcggcctctggctttacctttagcagctatgcgatgcattgggtgcgtcaggcgccaggtaagggcttagagtgggtggcggttatctcttatgacggtagcaacaagtactacgccgatagcgttaaaggccgcttcacgattagccgcgacaacagcaaaaataccttatacttacagatgaattctttacgcgccgaggatacggccgtttattattgtgcccgtaactcttctggttactactcttattggggccaatggggtcagggtaccctggtgacggtttctagcggcggcagctctcgctcttcttctagcggtggtggcggcagcggtggcggcggtgaaattgtgttaacccagtctccggcgaccctgagcctgagcccgggtgagcgtgccacgctgagctgccgcgcgtctcaatctgtgtcttcttcttatttagcgtggtaccagcaaaaaccgggtcaagcgccacgtttattaatttatggcgccagctctcgcgccaccggtatcccagcccgttttagcggtagcggcagcggtaccgattttacgttaaccattagccgcttagaaccggaggacttcgcggtttactattgtcagacgtggggcaccggtattcgcatcttcggccagggcacgaaggttgagattaaa

SEQ ID NO: 607 - DNA, 759 bp, synthetic construct
  source 1..759: mol_type = other DNA
caggtgcagttagttgaaagcggcggtggtgtggtgcaaccgggtcgtagcttacgtttatcttgcgcggcctctggctttacctttagcagctatgcgatgcattgggtgcgtcaggcgccaggtaagggcttagagtgggtggcggttatctcttatgacggtagcaacaagtactacgccgatagcgttaaaggccgcttcacgattagccgcgacaacagcaaaaataccttatacttacagatgaattctttacgcgccgaggatacggccgtttattattgtgcccgtccaaagcgcacggttttaggtagcacccgcttcgatatctggggccagtggggccaaggtacgctggtgaccgtgtcttctggtggttctagccgctctagcagcagcggtggcggcggtagcggcggcggtggcgaaatcgtgctgacccagagcccggcgaccttatctctgtctccaggcgaacgtgccaccttatcttgtcgtgcctctcaaagcgttagctctagctacctggcgtggtaccaacagaagccgggtcaagcgccgcgtttactgatctacggtgcgtcttctcgcgccaccggcattccagcgcgtttttctggcagcggctctggtaccgattttacgttaaccatttctcgcttagaaccagaggatttcgcggtttattattgtggcgcctgggactctagcgataatgcccgcgttttcggccaaggcaccaaagttgagatcaaa

SEQ ID NO: 608 - DNA, 747 bp, synthetic construct
  source 1..747: mol_type = other DNA
caggtgcagttagttgaaagcggcggtggtgtggtgcaaccgggtcgtagcttacgtttatcttgcgcggcctctggctttacctttagcagctatgcgatgcattgggtgcgtcaggcgccaggtaagggcttagagtgggtggcggttatctcttatgacggtagcaacaagtactacgccgatagcgttaaaggccgcttcacgattagccgcgacaacagcaaaaataccttatacttacagatgaattctttacgcgccgaggatacggccgtttattattgtgcccgtcgcgccccaggttactcttctggcattgactactggggccaatggggccagggcacgttagttaccgtgagcagcggtggttcttctcgcagctcttctagcggcggcggtggcagcggtggcggcggcgagattgtgttaacccagagcccggcgaccctgagcttatctccgggtgagcgtgcgaccttaagctgtcgcgccagccaatctgttagctctagctacctggcctggtatcagcaaaagccgggtcaggccccacgtctgctgatctatggtgcctctagccgcgccacgggtattccggcgcgctttagcggctctggcagcggcacggactttaccctgacgatcagccgtttagagccagaagacttcgcggtttattactgccagacgtggggcacgggtatccgtgtgtttggtcaaggtacgaaagttgaaattaaa

SEQ ID NO: 609 - DNA, 747 bp, synthetic construct
  source 1..747: mol_type = other DNA
caggtgcagttagttgaaagcggcggtggtgtggtgcaaccgggtcgtagcttacgtttatcttgcgcggcctctggctttacctttagcagctatgcgatgcattgggtgcgtcaggcgccaggtaagggcttagagtgggtggcggttatctcttatgacggtagcaacaagtactacgccgatagcgttaaaggccgcttcacgattagccgcgacaacagcaaaaataccttatacttacagatgaattctttacgcgccgaggatacggccgtttattattgtgcccgtcgcgccgttggtttaacgttagattattggggtcaatggggccaaggcaccctggttacggttagcagcggcggctcttctcgctcttctagctctggtggcggcggctctggcggcggtggcgaaattgttctgacccaaagcccggcgaccctgagcctgagcccaggtgaacgcgccaccctgagctgtcgtgcctctcaaagcgtttcttctagctacctggcctggtatcaacagaaaccaggtcaggccccgcgcttactgatttatggtgcgtcttctcgcgcgacgggtatcccagcgcgtttttctggcagcggctctggcaccgatttcacgctgaccatttctcgcctggaaccagaggactttgccgtttattactgccaagtgtgggattctagctctgaccaccaggtgtttggtcaaggtacgaaagttgaaattaaa

SEQ ID NO: 610 - DNA, 750 bp, synthetic construct
  source 1..750: mol_type = other DNA
caggtgcagttagttgaaagcggcggtggtgtggtgcaaccgggtcgtagcttacgtttatcttgcgcggcctctggctttacctttagcagctatgcgatgcattgggtgcgtcaggcgccaggtaagggcttagagtgggtggcggttatctcttatgacggtagcaacaagtactacgccgatagcgttaaaggccgcttcacgattagccgcgacaacagcaaaaataccttatacttacagatgaattctttacgcgccgaggatacggccgtttattattgtgcccgtcgcgacccaggtacgtggcaattcgatccgtggggtcaatggggccaaggcaccctggttacggttagcagcggcggctcttctcgctcttctagctctggtggcggcggctctggcggcggtggcgaaattgttctgacccaaagcccggcgaccctgagcctgagcccaggtgaacgcgccaccctgagctgtcgtgcctctcaaagcgtttcttctagctacctggcctggtatcaacagaaaccaggtcaggccccgcgcttactgatttatggtgcgtcttctcgcgcgacgggtatcccagcgcgtttttctggcagcggctctggcaccgatttcacgctgaccatttctcgcctggaaccagaggactttgccgtttattactgcatgtcttatacccacgcgaacacggttgtggcgtttggtcaaggtacgaaagttgaaattaaa

SEQ ID NO: 611 - DNA, 762 bp, synthetic construct
  source 1..762: mol_type = other DNA
caggtgcagttagttgaaagcggcggtggtgtggtgcaaccgggtcgtagcttacgtttatcttgcgcggcctctggctttacctttagcagctatgcgatgcattgggtgcgtcaggcgccaggtaagggcttagagtgggtggcggttatctcttatgacggtagcaacaagtactacgccgatagcgttaaaggccgcttcacgattagccgcgacaacagcaaaaataccttatacttacagatgaattctttacgcgccgaggatacggccgtttattattgtgcccgtcgcgactactctaactcttactattattactacggcatggacgtgtggggccagtggggtcaaggtaccctggtgaccgtttcttctggtggtagctctcgcagcagcagctctggcggcggtggcagcggcggtggcggcgagattgtgctgacccagagcccggcgacgttaagcttatctccgggcgaacgcgcgacgttatcttgccgcgcctctcagtctgtgtctagctcttatctggcctggtaccagcaaaaaccaggtcaggcgccgcgcctgttaatctacggcgcctcttctcgcgcgaccggcatcccggcgcgtttcagcggcagcggttctggcaccgatttcacgctgaccatctctcgcctggagccagaagactttgccgtgtattactgctcttcttacaccagcaatgccatgcgcatcttcggccaaggcaccaaagttgagatcaaa

SEQ ID NO: 612 - DNA, 750 bp, synthetic construct
  source 1..750: mol_type = other DNA
caggtgcagttagttgaaagcggcggtggtgtggtgcaaccgggtcgtagcttacgtttatcttgcgcggcctctggctttacctttagcagctatgcgatgcattgggtgcgtcaggcgccaggtaagggcttagagtgggtggcggttatctcttatgacggtagcaacaagtactacgccgatagcgttaaaggccgcttcacgattagccgcgacaacagcaaaaataccttatacttacagatgaattctttacgcgccgaggatacggccgtttattattgtgcccgtcgcggtggtggtcacgacggttttgatgtttggggtcagtggggtcagggcaccttagttacggtgagcagcggcggttcttctcgctctagctcttctggcggcggcggtagcggcggtggcggcgaaatcgtgctgacgcagagcccggcgaccctgagcctgtctccaggcgagcgcgcgaccctgtcttgccgcgcctctcagtctgtttctagctcttatttagcgtggtaccagcagaagccaggccaagcgccacgcctgctgatttacggcgcctcttctcgtgccacgggtatcccggcgcgtttcagcggcagcggtagcggcaccgacttcaccctgaccatctctcgtctggagccagaggatttcgccgtgtactattgtcagacctgggacacctctatcccacatgtggtgttcggtcaaggtaccaaggtggaaattaaa

SEQ ID NO: 613 - DNA, 750 bp, synthetic construct
  source 1..750: mol_type = other DNA
caggtgcagttagttgaaagcggcggtggtgtggtgcaaccgggtcgtagcttacgtttatcttgcgcggcctctggctttacctttagcagctatgcgatgcattgggtgcgtcaggcgccaggtaagggcttagagtgggtggcggttatctcttatgacggtagcaacaagtactacgccgatagcgttaaaggccgcttcacgattagccgcgacaacagcaaaaataccttatacttacagatgaattctttacgcgccgaggatacggccgtttattattgtgcccgtcgcttagtttcttctgactctccgtatttcgactattggggtcagtggggccagggtacgttagtgaccgtgagctctggtggttcttctcgttcttctagcagcggcggtggcggctctggcggcggcggtgaaattgttctgacccagagcccggcgaccctgtctttaagcccaggtgaacgtgcgacgctgtcttgtcgcgcgtctcaatctgtgtctagctcttatttagcgtggtatcaacaaaaaccaggccaagccccgcgtctgttaatttacggtgccagctctcgcgccacgggcattccggcccgttttagcggtagcggcagcggtacggattttaccttaacgattagccgcttagagccggaggactttgccgtgtactattgcgagaattgggactctaacacccgtgtgttcggtcaaggtaccaaggtggaaattaaa

SEQ ID NO: 614 - DNA, 735 bp, synthetic construct
  source 1..735: mol_type = other DNA
caggtgcagttagttgaaagcggcggtggtgtggtgcaaccgggtcgtagcttacgtttatcttgcgcggcctctggctttacctttagcagctatgcgatgcattgggtgcgtcaggcgccaggtaagggcttagagtgggtggcggttatctcttatgacggtagcaacaagtactacgccgatagcgttaaaggccgcttcacgattagccgcgacaacagcaaaaataccttatacttacagatgaattctttacgcgccgaggatacggccgtttattattgtgcccgtcgcatgtctggtatcgactactggggtcagtggggccaaggtaccttagtgaccgtgtcttctggtggcagcagccgttcttcttcttctggtggcggtggtagcggcggcggtggcgaaatcgtgctgacccaaagcccggccaccctgagcctgagcccgggcgaacgcgccaccttatcttgccgtgcgtctcagtctgtttctagctcttacttagcgtggtaccagcaaaaaccaggccaggccccacgtttactgatctacggcgcgagctctcgtgccacgggtattccagcccgcttcagcggcagcggtagcggcaccgactttaccctgacgatcagccgtctggagccagaagatttcgccgtttattactgtaaacaatataacaatctgccaattacgttcggtcagggcaccaaggttgagatcaaa

SEQ ID NO: 615 - DNA, 735 bp, synthetic construct
  source 1..735: mol_type = other DNA
caggtgcagttagttgaaagcggcggtggtgtggtgcaaccgggtcgtagcttacgtttatcttgcgcggcctctggctttacctttagcagctatgcgatgcattgggtgcgtcaggcgccaggtaagggcttagagtgggtggcggttatctcttatgacggtagcaacaagtactacgccgatagcgttaaaggccgcttcacgattagccgcgacaacagcaaaaataccttatacttacagatgaattctttacgcgccgaggatacggccgtttattattgtgcccgtcgcatgtctggtatcgactactggggtcagtggggccaaggtaccttagtgaccgtgtcttctggtggcagcagccgttcttcttcttctggtggcggtggtagcggcggcggtggcgaaatcgtgctgacccaaagcccggccaccctgagcctgagcccgggcgaacgcgccaccttatcttgccgtgcgtctcagtctgtttctagctcttacttagcgtggtaccagcaaaaaccaggccaggccccacgtttactgatctacggcgcgagctctcgtgccacgggtattccagcccgcttcagcggcagcggtagcggcaccgactttaccctgacgatcagccgtctggagccagaagatttcgccgtttattactgtcagcaatatgacaatctgccactgacgttcggtcagggcaccaaggttgagatcaaa

SEQ ID NO: 616 - DNA, 735 bp, synthetic construct
  source 1..735: mol_type = other DNA
caggtgcagttagttgaaagcggcggtggtgtggtgcaaccgggtcgtagcttacgtttatcttgcgcggcctctggctttacctttagcagctatgcgatgcattgggtgcgtcaggcgccaggtaagggcttagagtgggtggcggttatctcttatgacggtagcaacaagtactacgccgatagcgttaaaggccgcttcacgattagccgcgacaacagcaaaaataccttatacttacagatgaattctttacgcgccgaggatacggccgtttattattgtgcccgtcgcatgtctggtatcgactactggggtcagtggggccaaggtaccttagtgaccgtgtcttctggtggcagcagccgttcttcttcttctggtggcggtggtagcggcggcggtggcgaaatcgtgctgacccaaagcccggccaccctgagcctgagcccgggcgaacgcgccaccttatcttgccgtgcgtctcagtctgtttctagctcttacttagcgtggtaccagcaaaaaccaggccaggccccacgtttactgatctacggcgcgagctctcgtgccacgggtattccagcccgcttcagcggcagcggtagcggcaccgactttaccctgacgatcagccgtctggagccagaagatttcgccgtttattactgtcagcaatataacaattggccgttaaccttcggtcaaggcaccaaagttgagatcaaa

SEQ ID NO: 617 - DNA, 735 bp, synthetic construct
  source 1..735: mol_type = other DNA
caggtgcagttagttgaaagcggcggtggtgtggtgcaaccgggtcgtagcttacgtttatcttgcgcggcctctggctttacctttagcagctatgcgatgcattgggtgcgtcaggcgccaggtaagggcttagagtgggtggcggttatctcttatgacggtagcaacaagtactacgccgatagcgttaaaggccgcttcacgattagccgcgacaacagcaaaaataccttatacttacagatgaattctttacgcgccgaggatacggccgtttattattgtgcccgtcgcatgtctggtatcgactactggggtcagtggggccaaggtaccttagtgaccgtgtcttctggtggcagcagccgttcttcttcttctggtggcggtggtagcggcggcggtggcgaaatcgtgctgacccaaagcccggccaccctgagcctgagcccgggcgaacgcgccaccttatcttgccgtgcgtctcagtctgtttctagctcttacttagcgtggtaccagcaaaaaccaggccaggccccacgtttactgatctacggcgcgagctctcgtgccacgggtattccagcccgcttcagcggcagcggtagcggcaccgactttaccctgacgatcagccgtctggagccagaagatttcgccgtttattactgtcagcaatataaccgttttccactgatcttcggtcagggcaccaaggttgagatcaaa

SEQ ID NO: 618 - DNA, 735 bp, synthetic construct
  source 1..735: mol_type = other DNA
caggtgcagttagttgaaagcggcggtggtgtggtgcaaccgggtcgtagcttacgtttatcttgcgcggcctctggctttacctttagcagctatgcgatgcattgggtgcgtcaggcgccaggtaagggcttagagtgggtggcggttatctcttatgacggtagcaacaagtactacgccgatagcgttaaaggccgcttcacgattagccgcgacaacagcaaaaataccttatacttacagatgaattctttacgcgccgaggatacggccgtttattattgtgcccgtcgcatgtctggtatcgactactggggtcagtggggccaaggtaccttagtgaccgtgtcttctggtggcagcagccgttcttcttcttctggtggcggtggtagcggcggcggtggcgaaatcgtgctgacccaaagcccggccaccctgagcctgagcccgggcgaacgcgccaccttatcttgccgtgcgtctcagtctgtttctagctcttacttagcgtggtaccagcaaaaaccaggccaggccccacgtttactgatctacggcgcgagctctcgtgccacgggtattccagcccgcttcagcggcagcggtagcggcaccgactttaccctgacgatcagccgtctggagccagaagatttcgccgtttattactgtcagcaatataacagctttccactgacgttcggtcagggcaccaaggttgagatcaaa

SEQ ID NO: 619 - DNA, 750 bp, synthetic construct
  source 1..750: mol_type = other DNA
caggtgcagttagttgaaagcggcggtggtgtggtgcaaccgggtcgtagcttacgtttatcttgcgcggcctctggctttacctttagcagctatgcgatgcattgggtgcgtcaggcgccaggtaagggcttagagtgggtggcggttatctcttatgacggtagcaacaagtactacgccgatagcgttaaaggccgcttcacgattagccgcgacaacagcaaaaataccttatacttacagatgaattctttacgcgccgaggatacggccgtttattattgtgcccgtcgcaacatgttacgcttaggtcgcgcgtttgactcttggggccaatggggccagggcacgttagttaccgtgagcagcggtggttcttctcgcagctcttctagcggcggcggtggcagcggtggcggcggcgagattgtgttaacccagagcccggcgaccctgagcttatctccgggtgagcgtgcgaccttaagctgtcgcgccagccaatctgttagctctagctacctggcctggtatcagcaaaagccgggtcaggccccacgtctgctgatctatggtgcctctagccgcgccacgggtattccggcgcgctttagcggctctggcagcggcacggactttaccctgacgatcagccgtttagagccagaagacttcgcggtttattactgccagacgtggggcacgggtatccgtgtgtttggtcaaggtacgaaagttgaaattaaa

SEQ ID NO: 620 - DNA, 750 bp, synthetic construct
  source 1..750: mol_type = other DNA
caggtgcagttagttgaaagcggcggtggtgtggtgcaaccgggtcgtagcttacgtttatcttgcgcggcctctggctttacctttagcagctatgcgatgcattgggtgcgtcaggcgccaggtaagggcttagagtgggtggcggttatctcttatgacggtagcaacaagtactacgccgatagcgttaaaggccgcttcacgattagccgcgacaacagcaaaaataccttatacttacagatgaattctttacgcgccgaggatacggccgtttattattgtgcccgtcgcccaacgtacggtgttccaatggattattggggtcaatggggccaaggcaccctggttacggttagcagcggcggctcttctcgctcttctagctctggtggcggcggctctggcggcggtggcgaaattgttctgacccaaagcccggcgaccctgagcctgagcccaggtgaacgcgccaccctgagctgtcgtgcctctcaaagcgtttcttctagctacctggcctggtatcaacagaaaccaggtcaggccccgcgcttactgatttatggtgcgtcttctcgcgcgacgggtatcccagcgcgtttttctggcagcggctctggcaccgatttcacgctgaccatttctcgcctggaaccagaggactttgccgtttattactgcggtacctgggattctagcttatctgccgtggtgtttggtcaaggtacgaaagttgaaattaaa

SEQ ID NO: 621 - DNA, 756 bp, synthetic construct
  source 1..756: mol_type = other DNA
caggtgcagttagttgaaagcggcggtggtgtggtgcaaccgggtcgtagcttacgtttatcttgcgcggcctctggctttacctttagcagctatgcgatgcattgggtgcgtcaggcgccaggtaagggcttagagtgggtggcggttatctcttatgacggtagcaacaagtactacgccgatagcgttaaaggccgcttcacgattagccgcgacaacagcaaaaataccttatacttacagatgaattctttacgcgccgaggatacggccgtttattattgtgcccgtcgccgcatcggttctttctctctgggcccattcgatccatggggccagtggggccaaggtacgctggtgaccgtgtcttctggtggttctagccgctctagcagcagcggtggcggcggtagcggcggcggtggcgaaatcgtgctgacccagagcccggcgaccttatctctgtctccaggcgaacgtgccaccttatcttgtcgtgcctctcaaagcgttagctctagctacctggcgtggtaccaacagaagccgggtcaagcgccgcgtttactgatctacggtgcgtcttctcgcgccaccggcattccagcgcgtttttctggcagcggctctggtaccgattttacgttaaccatttctcgcttagaaccagaggatttcgcggtttattattgtagctcttacggtggctataataactacgttttcggccaaggcaccaaagttgagatcaaa

SEQ ID NO: 622 - DNA, 774 bp, synthetic construct
  source 1..774: mol_type = other DNA
caggtgcagttagttgaaagcggcggtggtgtggtgcaaccgggtcgtagcttacgtttatcttgcgcggcctctggctttacctttagcagctatgcgatgcattgggtgcgtcaggcgccaggtaagggcttagagtgggtggcggttatctcttatgacggtagcaacaagtactacgccgatagcgttaaaggccgcttcacgattagccgcgacaacagcaaaaataccttatacttacagatgaattctttacgcgccgaggatacggccgtttattattgtgcccgttctggtgttcactaccgcgccgtgggcggttctgcgcgcctgaccgattacatggacgtttggggccagtggggccagggtacgttagttacggtgtcttctggcggcagctctcgtagctctagcagcggcggtggcggctctggcggcggcggcgaaattgtgctgacgcaaagcccagccaccctgagcttaagcccaggtgagcgtgccacgttaagctgtcgtgccagccaaagcgtgtcttctagctacctggcctggtaccagcagaaaccaggccaagccccacgtttattaatctacggcgcgagctctcgtgcgaccggtattccggcgcgcttcagcggcagcggttctggcaccgacttcacgctgacgatcagccgcctggagccggaagactttgccgtttactattgccagcactacgacaactggccgccaacctttggccaaggtacgaaagttgagattaaa

SEQ ID NO: 623 - DNA, 735 bp, synthetic construct
  source 1..735: mol_type = other DNA
caggtgcagttagttgaaagcggcggtggtgtggtgcaaccgggtcgtagcttacgtttatcttgcgcggcctctggctttacctttagcagctatgcgatgcattgggtgcgtcaggcgccaggtaagggcttagagtgggtggcggttatctcttatgacggtagcaacaagtactacgccgatagcgttaaaggccgcttcacgattagccgcgacaacagcaaaaataccttatacttacagatgaattctttacgcgccgaggatacggccgtttattattgtgcccgttctcacggtcacttcgactactggggccagtggggtcaaggcacgctggtgaccgtttcttctggcggcagcagccgctcttcttcttctggcggtggtggcagcggcggtggcggcgagattgtgctgacgcagagcccagcgaccctgagcctgagcccgggcgagcgcgcgacgttaagctgccgtgccagccaatctgttagctcttcttacctggcctggtatcaacagaagccgggccaagccccgcgcctgttaatctatggcgcgtctagccgcgccacgggcatcccagcccgctttagcggctctggcagcggcacggattttaccttaacgattagccgtttagagccggaagacttcgccgtgtactactgccaacagtacaataatttcccgttaacgttcggccagggcacgaaggttgagattaaa

SEQ ID NO: 624 - DNA, 747 bp, synthetic construct
  source 1..747: mol_type = other DNA
caggtgcagttagttgaaagcggcggtggtgtggtgcaaccgggtcgtagcttacgtttatcttgcgcggcctctggctttacctttagcagctatgcgatgcattgggtgcgtcaggcgccaggtaagggcttagagtgggtggcggttatctcttatgacggtagcaacaagtactacgccgatagcgttaaaggccgcttcacgattagccgcgacaacagcaaaaataccttatacttacagatgaattctttacgcgccgaggatacggccgtttattattgtgcccgttctatcgccgccgcctacgcctttgatatctggggtcagtggggtcagggcaccttagttacggtgagcagcggcggttcttctcgctctagctcttctggcggcggcggtagcggcggtggcggcgaaatcgtgctgacgcagagcccggcgaccctgagcctgtctccaggcgagcgcgcgaccctgtcttgccgcgcctctcagtctgtttctagctcttatttagcgtggtaccagcagaagccaggccaagcgccacgcctgctgatttacggcgcctcttctcgtgccacgggtatcccggcgcgtttcagcggcagcggtagcggcaccgacttcaccctgaccatctctcgtctggagccagaggatttcgccgtgtactattgtcagcagaactattctacgccaccgtggacctttggtcaaggtacgaaagttgaaattaaa

SEQ ID NO: 625 - DNA, 771 bp, synthetic construct
  source 1..771: mol_type = other DNA
caggtgcagttagttgaaagcggcggtggtgtggtgcaaccgggtcgtagcttacgtttatcttgcgcggcctctggctttacctttagcagctatgcgatgcattgggtgcgtcaggcgccaggtaagggcttagagtgggtggcggttatctcttatgacggtagcaacaagtactacgccgatagcgttaaaggccgcttcacgattagccgcgacaacagcaaaaataccttatacttacagatgaattctttacgcgccgaggatacggccgtttattattgtgcccgttctaagtaccactactacggtctgagcaacgttacctacggcgcgggcttcgactactggggccagtggggccagggtacgttagttacggtgtcttctggcggcagctctcgtagctctagcagcggcggtggcggctctggcggcggcggcgaaattgtgctgacgcaaagcccagccaccctgagcttaagcccaggtgagcgtgccacgttaagctgtcgtgccagccaaagcgtgtcttctagctacctggcctggtaccagcagaaaccaggccaagccccacgtttattaatctacggcgcgagctctcgtgcgaccggtattccggcgcgcttcagcggcagcggttctggcaccgacttcacgctgacgatcagccgcctggagccggaagactttgccgtttactattgccagcaatacaacccaccgccagtgacctttggtcaaggtaccaaggttgaaatcaaa

SEQ ID NO: 626 - DNA, 738 bp, synthetic construct
  source 1..738: mol_type = other DNA
caggtgcagttagttgaaagcggcggtggtgtggtgcaaccgggtcgtagcttacgtttatcttgcgcggcctctggctttacctttagcagctatgcgatgcattgggtgcgtcaggcgccaggtaagggcttagagtgggtggcggttatctcttatgacggtagcaacaagtactacgccgatagcgttaaaggccgcttcacgattagccgcgacaacagcaaaaataccttatacttacagatgaattctttacgcgccgaggatacggccgtttattattgtgcccgttctccaggtttacgcggtaacgattattggggtcaatggggccaaggcaccctggttacggttagcagcggcggctcttctcgctcttctagctctggtggcggcggctctggcggcggtggcgaaattgttctgacccaaagcccggcgaccctgagcctgagcccaggtgaacgcgccaccctgagctgtcgtgcctctcaaagcgtttcttctagctacctggcctggtatcaacagaaaccaggtcaggccccgcgcttactgatttatggtgcgtcttctcgcgcgacgggtatcccagcgcgtttttctggcagcggctctggcaccgatttcacgctgaccatttctcgcctggaaccagaggactttgccgtttattactgcggtagctatggtgcggttggtgtttttggccagggtacgaaggttgaaatcaaa

SEQ ID NO: 627 - DNA, 756 bp, synthetic construct
  source 1..756: mol_type = other DNA
caggtgcagttagttgaaagcggcggtggtgtggtgcaaccgggtcgtagcttacgtttatcttgcgcggcctctggctttacctttagcagctatgcgatgcattgggtgcgtcaggcgccaggtaagggcttagagtgggtggcggttatctcttatgacggtagcaacaagtactacgccgatagcgttaaaggccgcttcacgattagccgcgacaacagcaaaaataccttatacttacagatgaattctttacgcgccgaggatacggccgtttattattgtgcccgttctcaaccacgcccacgctacaattatggtaagtttgacccgtggggccagtggggtcaaggtaccctggtgaccgtttcttctggtggtagctctcgcagcagcagctctggcggcggtggcagcggcggtggcggcgagattgtgctgacccagagcccggcgacgttaagcttatctccgggcgaacgcgcgacgttatcttgccgcgcctctcagtctgtgtctagctcttatctggcctggtaccagcaaaaaccaggtcaggcgccgcgcctgttaatctacggcgcctcttctcgcgcgaccggcatcccggcgcgtttcagcggcagcggttctggcaccgatttcacgctgaccatctctcgcctggagccagaagactttgccgtgtattactgccaagtttgggacagcagcacccgcgttttcggtcagggtaccaaagtggagatcaaa

SEQ ID NO: 628 - DNA, 741 bp, synthetic construct
  source 1..741: mol_type = other DNA
caggtgcagttagttgaaagcggcggtggtgtggtgcaaccgggtcgtagcttacgtttatcttgcgcggcctctggctttacctttagcagctatgcgatgcattgggtgcgtcaggcgccaggtaagggcttagagtgggtggcggttatctcttatgacggtagcaacaagtactacgccgatagcgttaaaggccgcttcacgattagccgcgacaacagcaaaaataccttatacttacagatgaattctttacgcgccgaggatacggccgtttattattgtgcccgttctcgcttaggtgacgccttcgatatttggggtcaatggggccaaggcaccctggttacggttagcagcggcggctcttctcgctcttctagctctggtggcggcggctctggcggcggtggcgaaattgttctgacccaaagcccggcgaccctgagcctgagcccaggtgaacgcgccaccctgagctgtcgtgcctctcaaagcgtttcttctagctacctggcctggtatcaacagaaaccaggtcaggccccgcgcttactgatttatggtgcgtcttctcgcgcgacgggtatcccagcgcgtttttctggcagcggctctggcaccgatttcacgctgaccatttctcgcctggaaccagaggactttgccgtttattactgccaacagtatgacaatttaccattaacctttggccaaggtacgaaggtggagattaaa

SEQ ID NO: 629 - DNA, 768 bp, synthetic construct
  source 1..768: mol_type = other DNA
caggtgcagttagttgaaagcggcggtggtgtggtgcaaccgggtcgtagcttacgtttatcttgcgcggcctctggctttacctttagcagctatgcgatgcattgggtgcgtcaggcgccaggtaagggcttagagtgggtggcggttatctcttatgacggtagcaacaagtactacgccgatagcgttaaaggccgcttcacgattagccgcgacaacagcaaaaataccttatacttacagatgaattctttacgcgccgaggatacggccgtttattattgtgcccgttctacgttctactacggttctggccgtccatacagcgcctggtttgatccgtggggtcaatggggtcagggcaccctggttacggtttcttctggcggttctagccgtagctctagcagcggtggcggcggctctggcggcggtggcgaaattgtgctgacccagagcccagccaccttatctctgagcccgggtgaacgcgccacgctgtcttgtcgcgcgtctcagtctgtgtctagcagctacttagcgtggtaccagcaaaagccgggccaggccccgcgcttattaatttacggtgcctctagccgtgcgacgggcattccggcccgttttagcggttctggcagcggcacggactttaccttaacgatcagccgcttagaaccagaagactttgcggtttattactgtcaaacctgggatagccgcaagacggttgtgttcggccagggcacgaaggttgaaatcaaa

SEQ ID NO: 630 - DNA, 768 bp, synthetic construct
  source 1..768: mol_type = other DNA
caggtgcagttagttgaaagcggcggtggtgtggtgcaaccgggtcgtagcttacgtttatcttgcgcggcctctggctttacctttagcagctatgcgatgcattgggtgcgtcaggcgccaggtaagggcttagagtgggtggcggttatctcttatgacggtagcaacaagtactacgccgatagcgttaaaggccgcttcacgattagccgcgacaacagcaaaaataccttatacttacagatgaattctttacgcgccgaggatacggccgtttattattgtgcccgtacgggtggttcttctggtggttttgcgttatacggcttcggcatttggggccaatggggtcaaggcaccctggtgacggtttcttctggtggctcttctcgtagcagctctagcggcggtggcggcagcggtggcggcggtgaaattgtgctgacccagagcccggccacgctgtctttaagcccgggcgagcgtgccacgttaagctgtcgcgccagccaaagcgttagctctagctatttagcctggtatcaacagaagccaggccaggcgccacgtttattaatctatggtgcctcttctcgtgcgaccggtattccggcgcgctttagcggctctggtagcggcaccgacttcaccctgacgatctctcgtttagagccggaggatttcgcggtgtactattgtcaagtttgggatagcagctctgacttaccagtggtttttggccagggtacgaaggtggagatcaaa

SEQ ID NO: 631 - DNA, 744 bp, synthetic construct
  source 1..744: mol_type = other DNA
caggtgcagttagttgaaagcggcggtggtgtggtgcaaccgggtcgtagcttacgtttatcttgcgcggcctctggctttacctttagcagctatgcgatgcattgggtgcgtcaggcgccaggtaagggcttagagtgggtggcggttatctcttatgacggtagcaacaagtactacgccgatagcgttaaaggccgcttcacgattagccgcgacaacagcaaaaataccttatacttacagatgaattctttacgcgccgaggatacggccgtttattattgtgcccgtacgttaccacgcgccggtgcctttgatatctggggtcagtggggtcagggcaccttagttacggtgagcagcggcggttcttctcgctctagctcttctggcggcggcggtagcggcggtggcggcgaaatcgtgctgacgcagagcccggcgaccctgagcctgtctccaggcgagcgcgcgaccctgtcttgccgcgcctctcagtctgtttctagctcttatttagcgtggtaccagcagaagccaggccaagcgccacgcctgctgatttacggcgcctcttctcgtgccacgggtatcccggcgcgtttcagcggcagcggtagcggcaccgacttcaccctgaccatctctcgtctggagccagaggatttcgccgtgtactattgtcagcaggccaattctttcccaccgacctttggtcaaggtacgaaagttgaaattaaa

SEQ ID NO: 632 - DNA, 744 bp, synthetic construct
  source 1..744: mol_type = other DNA
caggtgcagttagttgaaagcggcggtggtgtggtgcaaccgggtcgtagcttacgtttatcttgcgcggcctctggctttacctttagcagctatgcgatgcattgggtgcgtcaggcgccaggtaagggcttagagtgggtggcggttatctcttatgacggtagcaacaagtactacgccgatagcgttaaaggccgcttcacgattagccgcgacaacagcaaaaataccttatacttacagatgaattctttacgcgccgaggatacggccgtttattattgtgcccgtacgttaccacgcgccggtgcctttgatatctggggtcagtggggtcagggcaccttagttacggtgagcagcggcggttcttctcgctctagctcttctggcggcggcggtagcggcggtggcggcgaaatcgtgctgacgcagagcccggcgaccctgagcctgtctccaggcgagcgcgcgaccctgtcttgccgcgcctctcagtctgtttctagctcttatttagcgtggtaccagcagaagccaggccaagcgccacgcctgctgatttacggcgcctcttctcgtgccacgggtatcccggcgcgtttcagcggcagcggtagcggcaccgacttcaccctgaccatctctcgtctggagccagaggatttcgccgtgtactattgtcagcaggcctattctccaccaccgacctttggtcaaggtacgaaagttgaaattaaa

SEQ ID NO: 633 - DNA, 744 bp, synthetic construct
  source 1..744: mol_type = other DNA
caggtgcagttagttgaaagcggcggtggtgtggtgcaaccgggtcgtagcttacgtttatcttgcgcggcctctggctttacctttagcagctatgcgatgcattgggtgcgtcaggcgccaggtaagggcttagagtgggtggcggttatctcttatgacggtagcaacaagtactacgccgatagcgttaaaggccgcttcacgattagccgcgacaacagcaaaaataccttatacttacagatgaattctttacgcgccgaggatacggccgtttattattgtgcccgtacgttaccacgcgccggtgcctttgatatctggggtcagtggggtcagggcaccttagttacggtgagcagcggcggttcttctcgctctagctcttctggcggcggcggtagcggcggtggcggcgaaatcgtgctgacgcagagcccggcgaccctgagcctgtctccaggcgagcgcgcgaccctgtcttgccgcgcctctcagtctgtttctagctcttatttagcgtggtaccagcagaagccaggccaagcgccacgcctgctgatttacggcgcctcttctcgtgccacgggtatcccggcgcgtttcagcggcagcggtagcggcaccgacttcaccctgaccatctctcgtctggagccagaggatttcgccgtgtactattgtcagcagtctaattctccaccaccgacctttggtcaaggtacgaaagttgaaattaaa

SEQ ID NO: 634 - DNA, 753 bp, synthetic construct
  source 1..753: mol_type = other DNA
caggtgcagttagttgaaagcggcggtggtgtggtgcaaccgggtcgtagcttacgtttatcttgcgcggcctctggctttacctttagcagctatgcgatgcattgggtgcgtcaggcgccaggtaagggcttagagtgggtggcggttatctcttatgacggtagcaacaagtactacgccgatagcgttaaaggccgcttcacgattagccgcgacaacagcaaaaataccttatacttacagatgaattctttacgcgccgaggatacggccgtttattattgtgcccgtacgcgcggtttatacttcggtccgtggggccaatggggtcagggtaccctggtgacggtttctagcggcggcagctctcgctcttcttctagcggtggtggcggcagcggtggcggcggtgaaattgtgttaacccagtctccggcgaccctgagcctgagcccgggtgagcgtgccacgctgagctgccgcgcgtctcaatctgtgtcttcttcttatttagcgtggtaccagcaaaaaccgggtcaagcgccacgtttattaatttatggcgccagctctcgcgccaccggtatcccagcccgttttagcggtagcggcagcggtaccgattttacgttaaccattagccgcttagaaccggaggacttcgcggtttactattgtggcacgtgggatagctctctgttatcttctagcctggtggttttcggtcaaggcacgaaagtggaaatcaaa

SEQ ID NO: 635 - DNA, 747 bp, synthetic construct
  source 1..747: mol_type = other DNA
caggtgcagttagttgaaagcggcggtggtgtggtgcaaccgggtcgtagcttacgtttatcttgcgcggcctctggctttacctttagcagctatgcgatgcattgggtgcgtcaggcgccaggtaagggcttagagtgggtggcggttatctcttatgacggtagcaacaagtactacgccgatagcgttaaaggccgcttcacgattagccgcgacaacagcaaaaataccttatacttacagatgaattctttacgcgccgaggatacggccgtttattattgtgcccgtacgcgcggtttatacttcggtccgtggggccaatggggtcagggtaccctggtgacggtttctagcggcggcagctctcgctcttcttctagcggtggtggcggcagcggtggcggcggtgaaattgtgttaacccagtctccggcgaccctgagcctgagcccgggtgagcgtgccacgctgagctgccgcgcgtctcaatctgtgtcttcttcttatttagcgtggtaccagcaaaaaccgggtcaagcgccacgtttattaatttatggcgccagctctcgcgccaccggtatcccagcccgttttagcggtagcggcagcggtaccgattttacgttaaccattagccgcttagaaccggaggacttcgcggtttactattgtaattcttgggatagccgcggcggtcacttagtggtgtttggtcaaggtacgaaagttgaaattaaa

SEQ ID NO: 636 - DNA, 747 bp, synthetic construct
  source 1..747: mol_type = other DNA
caggtgcagttagttgaaagcggcggtggtgtggtgcaaccgggtcgtagcttacgtttatcttgcgcggcctctggctttacctttagcagctatgcgatgcattgggtgcgtcaggcgccaggtaagggcttagagtgggtggcggttatctcttatgacggtagcaacaagtactacgccgatagcgttaaaggccgcttcacgattagccgcgacaacagcaaaaataccttatacttacagatgaattctttacgcgccgaggatacggccgtttattattgtgcccgtacgcgcggtttatacttcggtccgtggggccaatggggtcagggtaccctggtgacggtttctagcggcggcagctctcgctcttcttctagcggtggtggcggcagcggtggcggcggtgaaattgtgttaacccagtctccggcgaccctgagcctgagcccgggtgagcgtgccacgctgagctgccgcgcgtctcaatctgtgtcttcttcttatttagcgtggtaccagcaaaaaccgggtcaagcgccacgtttattaatttatggcgccagctctcgcgccaccggtatcccagcccgttttagcggtagcggcagcggtaccgattttacgttaaccattagccgcttagaaccggaggacttcgcggtttactattgtcaggtttgggattattctagcgacttacacgtggtgtttggtcaaggtacgaaagttgaaattaaa

SEQ ID NO: 637 - DNA, 741 bp, synthetic construct
  source 1..741: mol_type = other DNA
caggtgcagttagttgaaagcggcggtggtgtggtgcaaccgggtcgtagcttacgtttatcttgcgcggcctctggctttacctttagcagctatgcgatgcattgggtgcgtcaggcgccaggtaagggcttagagtgggtggcggttatctcttatgacggtagcaacaagtactacgccgatagcgttaaaggccgcttcacgattagccgcgacaacagcaaaaataccttatacttacagatgaattctttacgcgccgaggatacggccgtttattattgtgcccgtacgcgcggttcttacttcgactattggggccaatggggtcagggtaccctggtgacggtttctagcggcggcagctctcgctcttcttctagcggtggtggcggcagcggtggcggcggtgaaattgtgttaacccagtctccggcgaccctgagcctgagcccgggtgagcgtgccacgctgagctgccgcgcgtctcaatctgtgtcttcttcttatttagcgtggtaccagcaaaaaccgggtcaagcgccacgtttattaatttatggcgccagctctcgcgccaccggtatcccagcccgttttagcggtagcggcagcggtaccgattttacgttaaccattagccgcttagaaccggaggacttcgcggtttactattgtcaggcctgggatagcacgccgtctgttgtttttggccagggtacgaaggttgaaatcaaa

SEQ ID NO: 638 - DNA, 756 bp, synthetic construct
  source 1..756: mol_type = other DNA
caggtgcagttagttgaaagcggcggtggtgtggtgcaaccgggtcgtagcttacgtttatcttgcgcggcctctggctttacctttagcagctatgcgatgcattgggtgcgtcaggcgccaggtaagggcttagagtgggtggcggttatctcttatgacggtagcaacaagtactacgccgatagcgttaaaggccgcttcacgattagccgcgacaacagcaaaaataccttatacttacagatgaattctttacgcgccgaggatacggccgtttattattgtgcccgtacgtcttctggttctacggccgcgccgatcggttattggggtcagtggggccagggtacgttagtgaccgtgagctctggtggttcttctcgttcttctagcagcggcggtggcggctctggcggcggcggtgaaattgttctgacccagagcccggcgaccctgtctttaagcccaggtgaacgtgcgacgctgtcttgtcgcgcgtctcaatctgtgtctagctcttatttagcgtggtatcaacaaaaaccaggccaagccccgcgtctgttaatttacggtgccagctctcgcgccacgggcattccggcccgttttagcggtagcggcagcggtacggattttaccttaacgattagccgcttagagccggaggactttgccgtgtactattgcgccgcgtgggacgactctggcggcagcccagttttcggtcagggtaccaaagtggagatcaaa

SEQ ID NO: 639 - DNA, 750 bp, synthetic construct
  source 1..750: mol_type = other DNA
caggtgcagttagttgaaagcggcggtggtgtggtgcaaccgggtcgtagcttacgtttatcttgcgcggcctctggctttacctttagcagctatgcgatgcattgggtgcgtcaggcgccaggtaagggcttagagtgggtggcggttatctcttatgacggtagcaacaagtactacgccgatagcgttaaaggccgcttcacgattagccgcgacaacagcaaaaataccttatacttacagatgaattctttacgcgccgaggatacggccgtttattattgtgcccgtacggttggtccatacggtcgcacctatttcgactattggggtcagtggggccagggtacgttagtgaccgtgagctctggtggttcttctcgttcttctagcagcggcggtggcggctctggcggcggcggtgaaattgttctgacccagagcccggcgaccctgtctttaagcccaggtgaacgtgcgacgctgtcttgtcgcgcgtctcaatctgtgtctagctcttatttagcgtggtatcaacaaaaaccaggccaagccccgcgtctgttaatttacggtgccagctctcgcgccacgggcattccggcccgttttagcggtagcggcagcggtacggattttaccttaacgattagccgcttagagccggaggactttgccgtgtactattgccaacaggccaactctccgccgattacgttcggtcaaggcacgaaagtggaaatcaaa

SEQ ID NO: 640 - DNA, 753 bp, synthetic construct
  source 1..753: mol_type = other DNA
caggtgcagttagttgaaagcggcggtggtgtggtgcaaccgggtcgtagcttacgtttatcttgcgcggcctctggctttacctttagcagctatgcgatgcattgggtgcgtcaggcgccaggtaagggcttagagtgggtggcggttatctcttatgacggtagcaacaagtactacgccgatagcgttaaaggccgcttcacgattagccgcgacaacagcaaaaataccttatacttacagatgaattctttacgcgccgaggatacggccgtttattattgtgcccgtgttgcccgcggtggttacaagaccgcggacttatggggccaatggggccagggcacgttagttaccgtgagcagcggtggttcttctcgcagctcttctagcggcggcggtggcagcggtggcggcggcgagattgtgttaacccagagcccggcgaccctgagcttatctccgggtgagcgtgcgaccttaagctgtcgcgccagccaatctgttagctctagctacctggcctggtatcagcaaaagccgggtcaggccccacgtctgctgatctatggtgcctctagccgcgccacgggtattccggcgcgctttagcggctctggcagcggcacggactttaccctgacgatcagccgtttagagccagaagacttcgcggtttattactgcctggtttgggattcttcttctgatcatgtgatcttcggtcaaggcacgaaagtggaaatcaaa

SEQ ID NO: 641 - DNA, 747 bp, synthetic construct
  source 1..747: mol_type = other DNA
caggtgcagttagttgaaagcggcggtggtgtggtgcaaccgggtcgtagcttacgtttatcttgcgcggcctctggctttacctttagcagctatgcgatgcattgggtgcgtcaggcgccaggtaagggcttagagtgggtggcggttatctcttatgacggtagcaacaagtactacgccgatagcgttaaaggccgcttcacgattagccgcgacaacagcaaaaataccttatacttacagatgaattctttacgcgccgaggatacggccgtttattattgtgcccgtgttgcccgcggtggttacaagaccgcggacttatggggccaatggggccagggcacgttagttaccgtgagcagcggtggttcttctcgcagctcttctagcggcggcggtggcagcggtggcggcggcgagattgtgttaacccagagcccggcgaccctgagcttatctccgggtgagcgtgcgaccttaagctgtcgcgccagccaatctgttagctctagctacctggcctggtatcagcaaaagccgggtcaggccccacgtctgctgatctatggtgcctctagccgcgccacgggtattccggcgcgctttagcggctctggcagcggcacggactttaccctgacgatcagccgtttagagccagaagacttcgcggtttattactgccagcaatattacggtaacccgcataccttcggtcaaggtaccaaggtggaaattaaa

SEQ ID NO: 642 - DNA, 756 bp, synthetic construct
  source 1..756: mol_type = other DNA
caggtgcagttagttgaaagcggcggtggtgtggtgcaaccgggtcgtagcttacgtttatcttgcgcggcctctggctttacctttagcagctatgcgatgcattgggtgcgtcaggcgccaggtaagggcttagagtgggtggcggttatctcttatgacggtagcaacaagtactacgccgatagcgttaaaggccgcttcacgattagccgcgacaacagcaaaaataccttatacttacagatgaattctttacgcgccgaggatacggccgtttattattgtgcccgtgttgcccgcggtggttacaagaccgcggacttatggggccaatggggccagggcacgttagttaccgtgagcagcggtggttcttctcgcagctcttctagcggcggcggtggcagcggtggcggcggcgagattgtgttaacccagagcccggcgaccctgagcttatctccgggtgagcgtgcgaccttaagctgtcgcgccagccaatctgttagctctagctacctggcctggtatcagcaaaagccgggtcaggccccacgtctgctgatctatggtgcctctagccgcgccacgggtattccggcgcgctttagcggctctggcagcggcacggactttaccctgacgatcagccgtttagagccagaagacttcgcggtttattactgccagtcttatgacaactctctgcgtggctctaaggttttcggccaaggcaccaaagttgagatcaaa

SEQ ID NO: 643 - DNA, 786 bp, synthetic construct
  source 1..786: mol_type = other DNA
caggtgcagttagttgaaagcggcggtggtgtggtgcaaccgggtcgtagcttacgtttatcttgcgcggcctctggctttacctttagcagctatgcgatgcattgggtgcgtcaggcgccaggtaagggcttagagtgggtggcggttatctcttatgacggtagcaacaagtactacgccgatagcgttaaaggccgcttcacgattagccgcgacaacagcaaaaataccttatacttacagatgaattctttacgcgccgaggatacggccgtttattattgtgcccgtgttgcccgcggttcttacacgagctgggtggactctccgtacccggcgagcgcccgctactatatggatgtgtggggccaatggggtcaaggtacgctggttacggtgagcagcggtggcagctctcgtagcagctctagcggcggtggcggcagcggcggcggcggcgaaatcgttctgacgcaaagcccggcgacgctgtctttatctccgggtgagcgcgcgacgctgtcttgccgcgcgagccaatctgtgtctagctcttacctggcgtggtatcaacagaagccaggtcaggccccacgcttactgatttatggtgcgagcagccgcgcgaccggcatcccagcgcgtttttctggtagcggctctggtacggatttcacgctgacgatttctcgtctggagccggaggacttcgcggtgtattactgtcaaacgtggggcacgggcattcgtgttttcggtcagggtacgaaagttgaaattaaa

SEQ ID NO: 644 - DNA, 753 bp, synthetic construct
  source 1..753: mol_type = other DNA
caggtgcagttagttgaaagcggcggtggtgtggtgcaaccgggtcgtagcttacgtttatcttgcgcggcctctggctttacctttagcagctatgcgatgcattgggtgcgtcaggcgccaggtaagggcttagagtgggtggcggttatctcttatgacggtagcaacaagtactacgccgatagcgttaaaggccgcttcacgattagccgcgacaacagcaaaaataccttatacttacagatgaattctttacgcgccgaggatacggccgtttattattgtgcccgtgttggttggaacggtggtaaccacggcgcgttcgacatttggggtcagtggggccagggtacgttagtgaccgtgagctctggtggttcttctcgttcttctagcagcggcggtggcggctctggcggcggcggtgaaattgttctgacccagagcccggcgaccctgtctttaagcccaggtgaacgtgcgacgctgtcttgtcgcgcgtctcaatctgtgtctagctcttatttagcgtggtatcaacaaaaaccaggccaagccccgcgtctgttaatttacggtgccagctctcgcgccacgggcattccggcccgttttagcggtagcggcagcggtacggattttaccttaacgattagccgcttagagccggaggactttgccgtgtactattgccgccaggccatgcgctggccagtggcgtttggtcaaggtacgaaagttgaaattaaa

SEQ ID NO: 645 - DNA, 765 bp, synthetic construct
  source 1..765: mol_type = other DNA
caggtgcagttagttgaaagcggcggtggtgtggtgcaaccgggtcgtagcttacgtttatcttgcgcggcctctggctttacctttagcagctatgcgatgcattgggtgcgtcaggcgccaggtaagggcttagagtgggtggcggttatctcttatgacggtagcaacaagtactacgccgatagcgttaaaggccgcttcacgattagccgcgacaacagcaaaaataccttatacttacagatgaattctttacgcgccgaggatacggccgtttattattgtgcccgtgttggttgggtttctgccccagaggcgctggccacgaccccactggattattggggtcaatggggtcagggcaccctggttacggtttcttctggcggttctagccgtagctctagcagcggtggcggcggctctggcggcggtggcgaaattgtgctgacccagagcccagccaccttatctctgagcccgggtgaacgcgccacgctgtcttgtcgcgcgtctcagtctgtgtctagcagctacttagcgtggtaccagcaaaagccgggccaggccccgcgcttattaatttacggtgcctctagccgtgcgacgggcattccggcccgttttagcggttctggcagcggcacggactttaccttaacgatcagccgcttagaaccagaagactttgcggtttattactgtatgcaagcgctgcagccaccaatcacgtttggtcagggcaccaaggttgagattaaa

SEQ ID NO: 646 - DNA, 756 bp, synthetic construct
  source 1..756: mol_type = other DNA
caggtgcagttagttgaaagcggcggtggtgtggtgcaaccgggtcgtagcttacgtttatcttgcgcggcctctggctttacctttagcagctatgcgatgcattgggtgcgtcaggcgccaggtaagggcttagagtgggtggcggttatctcttatgacggtagcaacaagtactacgccgatagcgttaaaggccgcttcacgattagccgcgacaacagcaaaaataccttatacttacagatgaattctttacgcgccgaggatacggccgtttattattgtgcccgtgttggttacgcctctgccggttatcagatcgaccattggggtcagtggggccagggtacgttagtgaccgtgagctctggtggttcttctcgttcttctagcagcggcggtggcggctctggcggcggcggtgaaattgttctgacccagagcccggcgaccctgtctttaagcccaggtgaacgtgcgacgctgtcttgtcgcgcgtctcaatctgtgtctagctcttatttagcgtggtatcaacaaaaaccaggccaagccccgcgtctgttaatttacggtgccagctctcgcgccacgggcattccggcccgttttagcggtagcggcagcggtacggattttaccttaacgattagccgcttagagccggaggactttgccgtgtactattgcggtacctgggactcttctgcgagcccgtacgttttcggtcagggtaccaaagtggagatcaaa

SEQ ID NO: 647 - DNA, 753 bp, synthetic construct
  source 1..753: mol_type = other DNA
caggtgcagttagttgaaagcggcggtggtgtggtgcaaccgggtcgtagcttacgtttatcttgcgcggcctctggctttacctttagcagctatgcgatgcattgggtgcgtcaggcgccaggtaagggcttagagtgggtggcggttatctcttatgacggtagcaacaagtactacgccgatagcgttaaaggccgcttcacgattagccgcgacaacagcaaaaataccttatacttacagatgaattctttacgcgccgaggatacggccgtttattattgtgcccgtgttttaccaatgaagttattacgcggcgaattctactattggggtcagtggggccagggtacgttagtgaccgtgagctctggtggttcttctcgttcttctagcagcggcggtggcggctctggcggcggcggtgaaattgttctgacccagagcccggcgaccctgtctttaagcccaggtgaacgtgcgacgctgtcttgtcgcgcgtctcaatctgtgtctagctcttatttagcgtggtatcaacaaaaaccaggccaagccccgcgtctgttaatttacggtgccagctctcgcgccacgggcattccggcccgttttagcggtagcggcagcggtacggattttaccttaacgattagccgcttagagccggaggactttgccgtgtactattgcggtacctgggactcttctgcgggcgtgttcggtcaaggtaccaaggtggaaattaaa

SEQ ID NO: 648 - DNA, 744 bp, synthetic construct
  source 1..744: mol_type = other DNA
caggtgcagttagttgaaagcggcggtggtgtggtgcaaccgggtcgtagcttacgtttatcttgcgcggcctctggctttacctttagcagctatgcgatgcattgggtgcgtcaggcgccaggtaagggcttagagtgggtggcggttatctcttatgacggtagcaacaagtactacgccgatagcgttaaaggccgcttcacgattagccgcgacaacagcaaaaataccttatacttacagatgaattctttacgcgccgaggatacggccgtttattattgtgcccgtgttccaggtcgcacgcgctactttgattcttggggtcagtggggtcagggcaccttagttacggtgagcagcggcggttcttctcgctctagctcttctggcggcggcggtagcggcggtggcggcgaaatcgtgctgacgcagagcccggcgaccctgagcctgtctccaggcgagcgcgcgaccctgtcttgccgcgcctctcagtctgtttctagctcttatttagcgtggtaccagcagaagccaggccaagcgccacgcctgctgatttacggcgcctcttctcgtgccacgggtatcccggcgcgtttcagcggcagcggtagcggcaccgacttcaccctgaccatctctcgtctggagccagaggatttcgccgtgtactattgtcagcagtctaattctttcccaccgacctttggtcaaggtacgaaagttgaaattaaa

SEQ ID NO: 649 - DNA, 756 bp, synthetic construct
  source 1..756: mol_type = other DNA
caggtgcagttagttgaaagcggcggtggtgtggtgcaaccgggtcgtagcttacgtttatcttgcgcggcctctggctttacctttagcagctatgcgatgcattgggtgcgtcaggcgccaggtaagggcttagagtgggtggcggttatctcttatgacggtagcaacaagtactacgccgatagcgttaaaggccgcttcacgattagccgcgacaacagcaaaaataccttatacttacagatgaattctttacgcgccgaggatacggccgtttattattgtgcccgtgttcgctctggttactcttctagccagccagactattggggtcagtggggccagggtacgttagtgaccgtgagctctggtggttcttctcgttcttctagcagcggcggtggcggctctggcggcggcggtgaaattgttctgacccagagcccggcgaccctgtctttaagcccaggtgaacgtgcgacgctgtcttgtcgcgcgtctcaatctgtgtctagctcttatttagcgtggtatcaacaaaaaccaggccaagccccgcgtctgttaatttacggtgccagctctcgcgccacgggcattccggcccgttttagcggtagcggcagcggtacggattttaccttaacgattagccgcttagagccggaggactttgccgtgtactattgcgttacctgggactcttctctgagcgtgtacgttttcggtcagggtaccaaagtggagatcaaa

SEQ ID NO: 650 - DNA, 753 bp, synthetic construct
  source 1..753: mol_type = other DNA
caggtgcagttagttgaaagcggcggtggtgtggtgcaaccgggtcgtagcttacgtttatcttgcgcggcctctggctttacctttagcagctatgcgatgcattgggtgcgtcaggcgccaggtaagggcttagagtgggtggcggttatctcttatgacggtagcaacaagtactacgccgatagcgttaaaggccgcttcacgattagccgcgacaacagcaaaaataccttatacttacagatgaattctttacgcgccgaggatacggccgtttattattgtgcccgtgttacgtctcgcgacggttacggcatgggcgtttggggtcagtggggtcagggcaccttagttacggtgagcagcggcggttcttctcgctctagctcttctggcggcggcggtagcggcggtggcggcgaaatcgtgctgacgcagagcccggcgaccctgagcctgtctccaggcgagcgcgcgaccctgtcttgccgcgcctctcagtctgtttctagctcttatttagcgtggtaccagcagaagccaggccaagcgccacgcctgctgatttacggcgcctcttctcgtgccacgggtatcccggcgcgtttcagcggcagcggtagcggcaccgacttcaccctgaccatctctcgtctggagccagaggatttcgccgtgtactattgtagcagctacacctcttcttctaccctggtggccttcggtcaaggcacgaaagtggaaatcaaa

SEQ ID NO: 651 - DNA, 750 bp, synthetic construct
  source 1..750: mol_type = other DNA
caggtgcagttagttgaaagcggcggtggtgtggtgcaaccgggtcgtagcttacgtttatcttgcgcggcctctggctttacctttagcagctatgcgatgcattgggtgcgtcaggcgccaggtaagggcttagagtgggtggcggttatctcttatgacggtagcaacaagtactacgccgatagcgttaaaggccgcttcacgattagccgcgacaacagcaaaaataccttatacttacagatgaattctttacgcgccgaggatacggccgtttattattgtgcccgttggggtgactctgaggttggtaacgcgtttgacatctggggccaatggggccagggcacgttagttaccgtgagcagcggtggttcttctcgcagctcttctagcggcggcggtggcagcggtggcggcggcgagattgtgttaacccagagcccggcgaccctgagcttatctccgggtgagcgtgcgaccttaagctgtcgcgccagccaatctgttagctctagctacctggcctggtatcagcaaaagccgggtcaggccccacgtctgctgatctatggtgcctctagccgcgccacgggtattccggcgcgctttagcggctctggcagcggcacggactttaccctgacgatcagccgtttagagccagaagacttcgcggtttattactgccagcaatataactcttacccgccgaccttcggtcaaggtaccaaggtggaaattaaa

SEQ ID NO: 652 - DNA, 759 bp, synthetic construct
  source 1..759: mol_type = other DNA
caggtgcagttagttgaaagcggcggtggtgtggtgcaaccgggtcgtagcttacgtttatcttgcgcggcctctggctttacctttagcagctatgcgatgcattgggtgcgtcaggcgccaggtaagggcttagagtgggtggcggttatctcttatgacggtagcaacaagtactacgccgatagcgttaaaggccgcttcacgattagccgcgacaacagcaaaaataccttatacttacagatgaattctttacgcgccgaggatacggccgtttattattgtgcccgttactacgacccaacgggttacctgaccgactactggggccaatggggccagggcacgttagttaccgtgagcagcggtggttcttctcgcagctcttctagcggcggcggtggcagcggtggcggcggcgagattgtgttaacccagagcccggcgaccctgagcttatctccgggtgagcgtgcgaccttaagctgtcgcgccagccaatctgttagctctagctacctggcctggtatcagcaaaagccgggtcaggccccacgtctgctgatctatggtgcctctagccgcgccacgggtattccggcgcgctttagcggctctggcagcggcacggactttaccctgacgatcagccgtttagagccagaagacttcgcggtttattactgcgcggcctatgacgactctctgctgaatccaggtaagatctttggtcagggcaccaaggttgagattaaa

SEQ ID NO: 653 - DNA, 750 bp, synthetic construct
  source 1..750: mol_type = other DNA
caggtgcagttagttgaaagcggcggtggtgtggtgcaaccgggtcgtagcttacgtttatcttgcgcggcctctggctttacctttagcagctatgcgatgcattgggtgcgtcaggcgccaggtaagggcttagagtgggtggcggttatctcttatgacggtagcaacaagtactacgccgatagcgttaaaggccgcttcacgattagccgcgacaacagcaaaaataccttatacttacagatgaattctttacgcgccgaggatacggccgtttattattgtgcccgttactacgacccaacgggttacctgaccgactactggggccaatggggccagggcacgttagttaccgtgagcagcggtggttcttctcgcagctcttctagcggcggcggtggcagcggtggcggcggcgagattgtgttaacccagagcccggcgaccctgagcttatctccgggtgagcgtgcgaccttaagctgtcgcgccagccaatctgttagctctagctacctggcctggtatcagcaaaagccgggtcaggccccacgtctgctgatctatggtgcctctagccgcgccacgggtattccggcgcgctttagcggctctggcagcggcacggactttaccctgacgatcagccgtttagagccagaagacttcgcggtttattactgccaggcctgggatcgctcttctctggtggtgttcggtcaaggtaccaaggtggaaattaaa

SEQ ID NO: 654 - DNA, 750 bp, synthetic construct
  source 1..750: mol_type = other DNA
caggtgcagttagttgaaagcggcggtggtgtggtgcaaccgggtcgtagcttacgtttatcttgcgcggcctctggctttacctttagcagctatgcgatgcattgggtgcgtcaggcgccaggtaagggcttagagtgggtggcggttatctcttatgacggtagcaacaagtactacgccgatagcgttaaaggccgcttcacgattagccgcgacaacagcaaaaataccttatacttacagatgaattctttacgcgccgaggatacggccgtttattattgtgcccgttactacgacccaacgggttacctgaccgactactggggccaatggggccagggcacgttagttaccgtgagcagcggtggttcttctcgcagctcttctagcggcggcggtggcagcggtggcggcggcgagattgtgttaacccagagcccggcgaccctgagcttatctccgggtgagcgtgcgaccttaagctgtcgcgccagccaatctgttagctctagctacctggcctggtatcagcaaaagccgggtcaggccccacgtctgctgatctatggtgcctctagccgcgccacgggtattccggcgcgctttagcggctctggcagcggcacggactttaccctgacgatcagccgtttagagccagaagacttcgcggtttattactgccaggcctgggattcttcttctagcgtggtgttcggtcaaggtaccaaggtggaaattaaa

SEQ ID NO: 655 - DNA, 747 bp, synthetic construct
  source 1..747: mol_type = other DNA
caggtgcagttagttgaaagcggcggtggtgtggtgcaaccgggtcgtagcttacgtttatcttgcgcggcctctggctttacctttagcagctatgcgatgcattgggtgcgtcaggcgccaggtaagggcttagagtgggtggcggttatctcttatgacggtagcaacaagtactacgccgatagcgttaaaggccgcttcacgattagccgcgacaacagcaaaaataccttatacttacagatgaattctttacgcgccgaggatacggccgtttattattgtgcccgttactacgacccaacgggttacctgaccgactactggggccaatggggccagggcacgttagttaccgtgagcagcggtggttcttctcgcagctcttctagcggcggcggtggcagcggtggcggcggcgagattgtgttaacccagagcccggcgaccctgagcttatctccgggtgagcgtgcgaccttaagctgtcgcgccagccaatctgttagctctagctacctggcctggtatcagcaaaagccgggtcaggccccacgtctgctgatctatggtgcctctagccgcgccacgggtattccggcgcgctttagcggctctggcagcggcacggactttaccctgacgatcagccgtttagagccagaagacttcgcggtttattactgccagcaaagctactctccaccgccgaccttcggtcaaggtaccaaggtggaaattaaa

SEQ ID NO: 656 - DNA, 747 bp, synthetic construct
  source 1..747: mol_type = other DNA
caggtgcagttagttgaaagcggcggtggtgtggtgcaaccgggtcgtagcttacgtttatcttgcgcggcctctggctttacctttagcagctatgcgatgcattgggtgcgtcaggcgccaggtaagggcttagagtgggtggcggttatctcttatgacggtagcaacaagtactacgccgatagcgttaaaggccgcttcacgattagccgcgacaacagcaaaaataccttatacttacagatgaattctttacgcgccgaggatacggccgtttattattgtgcccgttactacgacccaacgggttacctgaccgactactggggccaatggggccagggcacgttagttaccgtgagcagcggtggttcttctcgcagctcttctagcggcggcggtggcagcggtggcggcggcgagattgtgttaacccagagcccggcgaccctgagcttatctccgggtgagcgtgcgaccttaagctgtcgcgccagccaatctgttagctctagctacctggcctggtatcagcaaaagccgggtcaggccccacgtctgctgatctatggtgcctctagccgcgccacgggtattccggcgcgctttagcggctctggcagcggcacggactttaccctgacgatcagccgtttagagccagaagacttcgcggtttattactgccagcaatatggttcttctccgcgtaccttcggtcaaggtaccaaggtggaaattaaa

SEQ ID NO: 657 - DNA, 750 bp, synthetic construct
  source 1..750: mol_type = other DNA
caggtgcagttagttgaaagcggcggtggtgtggtgcaaccgggtcgtagcttacgtttatcttgcgcggcctctggctttacctttagcagctatgcgatgcattgggtgcgtcaggcgccaggtaagggcttagagtgggtggcggttatctcttatgacggtagcaacaagtactacgccgatagcgttaaaggccgcttcacgattagccgcgacaacagcaaaaataccttatacttacagatgaattctttacgcgccgaggatacggccgtttattattgtgcccgttactacgacccaacgggttacctgaccgactactggggccaatggggccagggcacgttagttaccgtgagcagcggtggttcttctcgcagctcttctagcggcggcggtggcagcggtggcggcggcgagattgtgttaacccagagcccggcgaccctgagcttatctccgggtgagcgtgcgaccttaagctgtcgcgccagccaatctgttagctctagctacctggcctggtatcagcaaaagccgggtcaggccccacgtctgctgatctatggtgcctctagccgcgccacgggtattccggcgcgctttagcggctctggcagcggcacggactttaccctgacgatcagccgtttagagccagaagacttcgcggtttattactgccagcaatattactctgccccgccgtatacgttcggtcaaggcacgaaagtggaaatcaaa

SEQ ID NO: 658 - DNA, 759 bp, synthetic construct
  source 1..759: mol_type = other DNA
caggtgcagttagttgaaagcggcggtggtgtggtgcaaccgggtcgtagcttacgtttatcttgcgcggcctctggctttacctttagcagctatgcgatgcattgggtgcgtcaggcgccaggtaagggcttagagtgggtggcggttatctcttatgacggtagcaacaagtactacgccgatagcgttaaaggccgcttcacgattagccgcgacaacagcaaaaataccttatacttacagatgaattctttacgcgccgaggatacggccgtttattattgtgcccgttactacgacccaacgggttacctgaccgactactggggccaatggggccagggcacgttagttaccgtgagcagcggtggttcttctcgcagctcttctagcggcggcggtggcagcggtggcggcggcgagattgtgttaacccagagcccggcgaccctgagcttatctccgggtgagcgtgcgaccttaagctgtcgcgccagccaatctgttagctctagctacctggcctggtatcagcaaaagccgggtcaggccccacgtctgctgatctatggtgcctctagccgcgccacgggtattccggcgcgctttagcggctctggcagcggcacggactttaccctgacgatcagccgtttagagccagaagacttcgcggtttattactgccagtcttatgactcttctctgctgagcggtcacgaggtttttggtcagggcaccaaggttgagattaaa

SEQ ID NO: 659 - DNA, 747 bp, synthetic construct
  source 1..747: mol_type = other DNA
caggtgcagttagttgaaagcggcggtggtgtggtgcaaccgggtcgtagcttacgtttatcttgcgcggcctctggctttacctttagcagctatgcgatgcattgggtgcgtcaggcgccaggtaagggcttagagtgggtggcggttatctcttatgacggtagcaacaagtactacgccgatagcgttaaaggccgcttcacgattagccgcgacaacagcaaaaataccttatacttacagatgaattctttacgcgccgaggatacggccgtttattattgtgcccgttactacgacccaacgggttacctgaccgactactggggccaatggggccagggcacgttagttaccgtgagcagcggtggttcttctcgcagctcttctagcggcggcggtggcagcggtggcggcggcgagattgtgttaacccagagcccggcgaccctgagcttatctccgggtgagcgtgcgaccttaagctgtcgcgccagccaatctgttagctctagctacctggcctggtatcagcaaaagccgggtcaggccccacgtctgctgatctatggtgcctctagccgcgccacgggtattccggcgcgctttagcggctctggcagcggcacggactttaccctgacgatcagccgtttagagccagaagacttcgcggtttattactgccagacgtgggattctttcggtcaggtgtttggtcaaggtacgaaagttgaaattaaa

SEQ ID NO: 660 - DNA, 771 bp, synthetic construct
  source 1..771: mol_type = other DNA
caggtgcagttagttgaaagcggcggtggtgtggtgcaaccgggtcgtagcttacgtttatcttgcgcggcctctggctttacctttagcagctatgcgatgcattgggtgcgtcaggcgccaggtaagggcttagagtgggtggcggttatctcttatgacggtagcaacaagtactacgccgatagcgttaaaggccgcttcacgattagccgcgacaacagcaaaaataccttatacttacagatgaattctttacgcgccgaggatacggccgtttattattgtgccagcgacggtggtggttaccgctcttatggccaatctatgtattacatggatgtgtggggccaatggggtcaaggcaccctggtgacggtttcttctggtggctcttctcgtagcagctctagcggcggtggcggcagcggtggcggcggtgaaattgtgctgacccagagcccggccacgctgtctttaagcccgggcgagcgtgccacgttaagctgtcgcgccagccaaagcgttagctctagctatttagcctggtatcaacagaagccaggccaggcgccacgtttattaatctatggtgcctcttctcgtgcgaccggtattccggcgcgctttagcggctctggtagcggcaccgacttcaccctgacgatctctcgtttagagccggaggatttcgcggtgtactattgtggtgcctgggatagccgttctaacgtttacgtgttcggccagggcacgaaggttgaaatcaaa

SEQ ID NO: 661 - DNA, 762 bp, synthetic construct
  source 1..762: mol_type = other DNA
caggtgcagttagttgaaagcggcggtggtgtggtgcaaccgggtcgtagcttacgtttatcttgcgcggcctctggctttacctttagcagctatgcgatgcattgggtgcgtcaggcgccaggtaagggcttagagtgggtggcggttatctcttatgacggtagcaacaagtactacgccgatagcgttaaaggccgcttcacgattagccgcgacaacagcaaaaataccttatacttacagatgaattctttacgcgccgaggatacggccgtttattattgtgccagcgagggttaccgcacggaccgcaaatattggttagactattggggtcagtggggccagggtacgttagtgaccgtgagctctggtggttcttctcgttcttctagcagcggcggtggcggctctggcggcggcggtgaaattgttctgacccagagcccggcgaccctgtctttaagcccaggtgaacgtgcgacgctgtcttgtcgcgcgtctcaatctgtgtctagctcttatttagcgtggtatcaacaaaaaccaggccaagccccgcgtctgttaatttacggtgccagctctcgcgccacgggcattccggcccgttttagcggtagcggcagcggtacggattttaccttaacgattagccgcttagagccggaggactttgccgtgtactattgcggtacctgggactcttctaatctgagcgccggtgttttcggccaaggcaccaaagttgagatcaaa

SEQ ID NO: 662 - DNA, 759 bp, synthetic construct
  source 1..759: mol_type = other DNA
caggtgcagttagttgaaagcggcggtggtgtggtgcaaccgggtcgtagcttacgtttatcttgcgcggcctctggctttacctttagcagctatgcgatgcattgggtgcgtcaggcgccaggtaagggcttagagtgggtggcggttatctcttatgacggtagcaacaagtactacgccgatagcgttaaaggccgcttcacgattagccgcgacaacagcaaaaataccttatacttacagatgaattctttacgcgccgaggatacggccgtttattattgtgccagcgagggttaccgcacggaccgcaaatattggttagactattggggtcagtggggccagggtacgttagtgaccgtgagctctggtggttcttctcgttcttctagcagcggcggtggcggctctggcggcggcggtgaaattgttctgacccagagcccggcgaccctgtctttaagcccaggtgaacgtgcgacgctgtcttgtcgcgcgtctcaatctgtgtctagctcttatttagcgtggtatcaacaaaaaccaggccaagccccgcgtctgttaatttacggtgccagctctcgcgccacgggcattccggcccgttttagcggtagcggcagcggtacggattttaccttaacgattagccgcttagagccggaggactttgccgtgtactattgccaagcgtgggactcttctagcgatcatacggttttcggtcagggtaccaaagtggagatcaaa

SEQ ID NO: 663 - DNA, 747 bp, synthetic construct
  source 1..747: mol_type = other DNA
caggtgcagttagttgaaagcggcggtggtgtggtgcaaccgggtcgtagcttacgtttatcttgcgcggcctctggctttacctttagcagctatgcgatgcattgggtgcgtcaggcgccaggtaagggcttagagtgggtggcggttatctcttatgacggtagcaacaagtactacgccgatagcgttaaaggccgcttcacgattagccgcgacaacagcaaaaataccttatacttacagatgaattctttacgcgccgaggatacggccgtttattattgtgccagcttattagactacggtgagacgggctattggggtcaatggggccaaggcaccctggttacggttagcagcggcggctcttctcgctcttctagctctggtggcggcggctctggcggcggtggcgaaattgttctgacccaaagcccggcgaccctgagcctgagcccaggtgaacgcgccaccctgagctgtcgtgcctctcaaagcgtttcttctagctacctggcctggtatcaacagaaaccaggtcaggccccgcgcttactgatttatggtgcgtcttctcgcgcgacgggtatcccagcgcgtttttctggcagcggctctggcaccgatttcacgctgaccatttctcgcctggaaccagaggactttgccgtttattactgccaagtgtgggattctcgttctgaccactgggtgtttggccaaggtacgaaggtggagattaaa

SEQ ID NO: 664 - DNA, 753 bp, synthetic construct
  source 1..753: mol_type = other DNA
caggtgcagttagttgaaagcggcggtggtgtggtgcaaccgggtcgtagcttacgtttatcttgcgcggcctctggctttacctttagcagctatgcgatgcattgggtgcgtcaggcgccaggtaagggcttagagtgggtggcggttatctcttatgacggtagcaacaagtactacgccgatagcgttaaaggccgcttcacgattagccgcgacaacagcaaaaataccttatacttacagatgaattctttacgcgccgaggatacggccgtttattattgtgccagctctatcgccgcccgccgctacggctatggtatggacgtgtggggtcagtggggccagggtacgttagtgaccgtgagctctggtggttcttctcgttcttctagcagcggcggtggcggctctggcggcggcggtgaaattgttctgacccagagcccggcgaccctgtctttaagcccaggtgaacgtgcgacgctgtcttgtcgcgcgtctcaatctgtgtctagctcttatttagcgtggtatcaacaaaaaccaggccaagccccgcgtctgttaatttacggtgccagctctcgcgccacgggcattccggcccgttttagcggtagcggcagcggtacggattttaccttaacgattagccgcttagagccggaggactttgccgtgtactattgccaacagtctgactctccgccgattacgttcggtcaaggcacgaaagtggaaatcaaa

SEQ ID NO: 665 - DNA, 753 bp, synthetic construct
  source 1..753: mol_type = other DNA
caggtgcagttagttgaaagcggcggtggtgtggtgcaaccgggtcgtagcttacgtttatcttgcgcggcctctggctttacctttagcagctatgcgatgcattgggtgcgtcaggcgccaggtaagggcttagagtgggtggcggttatctcttatgacggtagcaacaagtactacgccgatagcgttaaaggccgcttcacgattagccgcgacaacagcaaaaataccttatacttacagatgaattctttacgcgccgaggatacggccgtttattattgtgccagcacgggtgttaactaccgccgccgtgcgttcgacatttggggtcagtggggccagggtacgttagtgaccgtgagctctggtggttcttctcgttcttctagcagcggcggtggcggctctggcggcggcggtgaaattgttctgacccagagcccggcgaccctgtctttaagcccaggtgaacgtgcgacgctgtcttgtcgcgcgtctcaatctgtgtctagctcttatttagcgtggtatcaacaaaaaccaggccaagccccgcgtctgttaatttacggtgccagctctcgcgccacgggcattccggcccgttttagcggtagcggcagcggtacggattttaccttaacgattagccgcttagagccggaggactttgccgtgtactattgccaaagccacacgtctcgtacccaggttgttttcggtcagggtaccaaagtggagatcaaa

SEQ ID NO: 666 - DNA, 735 bp, synthetic construct
  source 1..735: mol_type = other DNA
caggtgcagttagttgaaagcggcggtggtgtggtgcaaccgggtcgtagcttacgtttatcttgcgcggcctctggctttacctttagcagctatgcgatgcattgggtgcgtcaggcgccaggtaagggcttagagtgggtggcggttatctcttatgacggtagcaacaagtactacgccgatagcgttaaaggccgcttcacgattagccgcgacaacagcaaaaataccttatacttacagatgaattctttacgcgccgaggatacggccgtttattattgtgccagcgttccacgcacgtactggggtcaatggggccagggtacgctggttaccgtgagctctggtggtagcagccgtagctcttcttctggtggtggcggttctggcggcggcggtgaaattgttctgacccagtctccggcgacgctgagcctgagcccgggcgaacgtgccacgctgtcttgtcgtgcgagccaaagcgtttcttctagctacttagcctggtatcaacagaagccgggtcaggcgccacgcctgttaatttacggtgcgagcagccgcgcgacgggtatcccggcccgcttctctggcagcggctctggcaccgatttcaccctgaccatctctcgtctggaaccagaggattttgccgtttactattgtggtacctgggacgattctagcggcggtcgtgttttcggtcagggcaccaaggttgagatcaaa

SEQ ID NO: 667 - DNA, 750 bp, synthetic construct
  source 1..750: mol_type = other DNA
caggtgcagttagttgaaagcggcggtggtgtggtgcaaccgggtcgtagcttacgtttatcttgcgcggcctctggctttacctttagcagctatgcgatgcattgggtgcgtcaggcgccaggtaagggcttagagtgggtggcggttatctcttatgacggtagcaacaagtactacgccgatagcgttaaaggccgcttcacgattagccgcgacaacagcaaaaataccttatacttacagatgaattctttacgcgccgaggatacggccgtttattattgtgccaccgagcaaccaaacggtggttggccactggattcttggggtcagtggggtcagggcaccttagttacggtgagcagcggcggttcttctcgctctagctcttctggcggcggcggtagcggcggtggcggcgaaatcgtgctgacgcagagcccggcgaccctgagcctgtctccaggcgagcgcgcgaccctgtcttgccgcgcctctcagtctgtttctagctcttatttagcgtggtaccagcagaagccaggccaagcgccacgcctgctgatttacggcgcctcttctcgtgccacgggtatcccggcgcgtttcagcggcagcggtagcggcaccgacttcaccctgaccatctctcgtctggagccagaggatttcgccgtgtactattgtagcagctacacctcttcttctaccctggtgttcggtcaaggtaccaaggtggaaattaaa

SEQ ID NO: 668 - DNA, 753 bp, synthetic construct
  source 1..753: mol_type = other DNA
caggtgcagttagttgaaagcggcggtggtgtggtgcaaccgggtcgtagcttacgtttatcttgcgcggcctctggctttacctttagcagctatgcgatgcattgggtgcgtcaggcgccaggtaagggcttagagtgggtggcggttatctcttatgacggtagcaacaagtactacgccgatagcgttaaaggccgcttcacgattagccgcgacaacagcaaaaataccttatacttacagatgaattctttacgcgccgaggatacggccgtttattattgtgccaccggtggttaccgcgactcttctggctatatggactactggggccaatggggccagggcacgttagttaccgtgagcagcggtggttcttctcgcagctcttctagcggcggcggtggcagcggtggcggcggcgagattgtgttaacccagagcccggcgaccctgagcttatctccgggtgagcgtgcgaccttaagctgtcgcgccagccaatctgttagctctagctacctggcctggtatcagcaaaagccgggtcaggccccacgtctgctgatctatggtgcctctagccgcgccacgggtattccggcgcgctttagcggctctggcagcggcacggactttaccctgacgatcagccgtttagagccagaagacttcgcggtttattactgccaggcctgggattcttctacggcggaagtgttcggtcaaggtaccaaggtggaaattaaa

SEQ ID NO: 669 - DNA, 762 bp, synthetic construct
  source 1..762: mol_type = other DNA
caggtgcagttagttgaaagcggcggtggtgtggtgcaaccgggtcgtagcttacgtttatcttgcgcggcctctggctttacctttagcagctatgcgatgcattgggtgcgtcaggcgccaggtaagggcttagagtgggtggcggttatctcttatgacggtagcaacaagtactacgccgatagcgttaaaggccgcttcacgattagccgcgacaacagcaaaaataccttatacttacagatgaattctttacgcgccgaggatacggccgtttattattgtgccaccggtggttaccgcggtgttttagcgggcgttgcctttgacatttggggccagtggggtcaaggtaccctggtgaccgtttcttctggtggtagctctcgcagcagcagctctggcggcggtggcagcggcggtggcggcgagattgtgctgacccagagcccggcgacgttaagcttatctccgggcgaacgcgcgacgttatcttgccgcgcctctcagtctgtgtctagctcttatctggcctggtaccagcaaaaaccaggtcaggcgccgcgcctgttaatctacggcgcctcttctcgcgcgaccggcatcccggcgcgtttcagcggcagcggttctggcaccgatttcacgctgaccatctctcgcctggagccagaagactttgccgtgtattactgcggtacgggtgatggcagcttatctggtgttgtgttcggccagggcacgaaggttgaaatcaaa

SEQ ID NO: 670 - DNA, 759 bp, synthetic construct
  source 1..759: mol_type = other DNA
caggtgcagttagttgaaagcggcggtggtgtggtgcaaccgggtcgtagcttacgtttatcttgcgcggcctctggctttacctttagcagctatgcgatgcattgggtgcgtcaggcgccaggtaagggcttagagtgggtggcggttatctcttatgacggtagcaacaagtactacgccgatagcgttaaaggccgcttcacgattagccgcgacaacagcaaaaataccttatacttacagatgaattctttacgcgccgaggatacggccgtttattattgtgccaccggtggttaccgcggtgttttagcgggcgttgcctttgacatttggggccagtggggtcaaggtaccctggtgaccgtttcttctggtggtagctctcgcagcagcagctctggcggcggtggcagcggcggtggcggcgagattgtgctgacccagagcccggcgacgttaagcttatctccgggcgaacgcgcgacgttatcttgccgcgcctctcagtctgtgtctagctcttatctggcctggtaccagcaaaaaccaggtcaggcgccgcgcctgttaatctacggcgcctcttctcgcgcgaccggcatcccggcgcgtttcagcggcagcggttctggcaccgatttcacgctgaccatctctcgcctggagccagaagactttgccgtgtattactgccaagcctgggacagcaccaatacgggtgttttcggccaaggcaccaaagttgagatcaaa

SEQ ID NO: 671 - DNA, 759 bp, synthetic construct
  source 1..759: mol_type = other DNA
caggtgcagttagttgaaagcggcggtggtgtggtgcaaccgggtcgtagcttacgtttatcttgcgcggcctctggctttacctttagcagctatgcgatgcattgggtgcgtcaggcgccaggtaagggcttagagtgggtggcggttatctcttatgacggtagcaacaagtactacgccgatagcgttaaaggccgcttcacgattagccgcgacaacagcaaaaataccttatacttacagatgaattctttacgcgccgaggatacggccgtttattattgtgccaccggtatctctgttgccggtaagtattattactactatatggacgtgtggggccagtggggtcaaggtaccctggtgaccgtttcttctggtggtagctctcgcagcagcagctctggcggcggtggcagcggcggtggcggcgagattgtgctgacccagagcccggcgacgttaagcttatctccgggcgaacgcgcgacgttatcttgccgcgcctctcagtctgtgtctagctcttatctggcctggtaccagcaaaaaccaggtcaggcgccgcgcctgttaatctacggcgcctcttctcgcgcgaccggcatcccggcgcgtttcagcggcagcggttctggcaccgatttcacgctgaccatctctcgcctggagccagaagactttgccgtgtattactgccgccaaggtaaacatggcccatggaagttcggtcagggtaccaaagtggagatcaaa

SEQ ID NO: 672 - DNA, 741 bp, synthetic construct
  source 1..741: mol_type = other DNA
caggtgcagttagttgaaagcggcggtggtgtggtgcaaccgggtcgtagcttacgtttatcttgcgcggcctctggctttacctttagcagctatgcgatgcattgggtgcgtcaggcgccaggtaagggcttagagtgggtggcggttatctcttatgacggtagcaacaagtactacgccgatagcgttaaaggccgcttcacgattagccgcgacaacagcaaaaataccttatacttacagatgaattctttacgcgccgaggatacggccgtttattattgtgccaccggttctggttggccagttcactggggtcagtggggccaaggtaccttagtgaccgtgtcttctggtggcagcagccgttcttcttcttctggtggcggtggtagcggcggcggtggcgaaatcgtgctgacccaaagcccggccaccctgagcctgagcccgggcgaacgcgccaccttatcttgccgtgcgtctcagtctgtttctagctcttacttagcgtggtaccagcaaaaaccaggccaggccccacgtttactgatctacggcgcgagctctcgtgccacgggtattccagcccgcttcagcggcagcggtagcggcaccgactttaccctgacgatcagccgtctggagccagaagatttcgccgtttattactgtcaggtttgggattctagcagcgaccatgttttattcggccagggcacgaaggttgagattaaa

SEQ ID NO: 673 - DNA, 750 bp, synthetic construct
  source 1..750: mol_type = other DNA
caggtgcagttagttgaaagcggcggtggtgtggtgcaaccgggtcgtagcttacgtttatcttgcgcggcctctggctttacctttagcagctatgcgatgcattgggtgcgtcaggcgccaggtaagggcttagagtgggtggcggttatctcttatgacggtagcaacaagtactacgccgatagcgttaaaggccgcttcacgattagccgcgacaacagcaaaaataccttatacttacagatgaattctttacgcgccgaggatacggccgtttattattgtgccaccggttcttaccgcaagtacgccggcggcttcgactattggggtcagtggggccagggtacgttagtgaccgtgagctctggtggttcttctcgttcttctagcagcggcggtggcggctctggcggcggcggtgaaattgttctgacccagagcccggcgaccctgtctttaagcccaggtgaacgtgcgacgctgtcttgtcgcgcgtctcaatctgtgtctagctcttatttagcgtggtatcaacaaaaaccaggccaagccccgcgtctgttaatttacggtgccagctctcgcgccacgggcattccggcccgttttagcggtagcggcagcggtacggattttaccttaacgattagccgcttagagccggaggactttgccgtgtactattgccaacagtcttactctccgccgccgacgttcggtcaaggcacgaaagtggaaatcaaa

SEQ ID NO: 674 - DNA, 753 bp, synthetic construct
  source 1..753: mol_type = other DNA
caggtgcagttagttgaaagcggcggtggtgtggtgcaaccgggtcgtagcttacgtttatcttgcgcggcctctggctttacctttagcagctatgcgatgcattgggtgcgtcaggcgccaggtaagggcttagagtgggtggcggttatctcttatgacggtagcaacaagtactacgccgatagcgttaaaggccgcttcacgattagccgcgacaacagcaaaaataccttatacttacagatgaattctttacgcgccgaggatacggccgtttattattgtgccaccggttcttaccgcaagtacgccggcggcttcgactattggggtcagtggggccagggtacgttagtgaccgtgagctctggtggttcttctcgttcttctagcagcggcggtggcggctctggcggcggcggtgaaattgttctgacccagagcccggcgaccctgtctttaagcccaggtgaacgtgcgacgctgtcttgtcgcgcgtctcaatctgtgtctagctcttatttagcgtggtatcaacaaaaaccaggccaagccccgcgtctgttaatttacggtgccagctctcgcgccacgggcattccggcccgttttagcggtagcggcagcggtacggattttaccttaacgattagccgcttagagccggaggactttgccgtgtactattgccaacagtacggttctagcccgagctactctttcggtcagggtaccaaagtggagatcaaa

SEQ ID NO: 675 - DNA, 756 bp, synthetic construct
  source 1..756: mol_type = other DNA
caggtgcagttagttgaaagcggcggtggtgtggtgcaaccgggtcgtagcttacgtttatcttgcgcggcctctggctttacctttagcagctatgcgatgcattgggtgcgtcaggcgccaggtaagggcttagagtgggtggcggttatctcttatgacggtagcaacaagtactacgccgatagcgttaaaggccgcttcacgattagccgcgacaacagcaaaaataccttatacttacagatgaattctttacgcgccgaggatacggccgtttattattgtgccaccggttcttaccgcaagtacgccggcggcttcgactattggggtcagtggggccagggtacgttagtgaccgtgagctctggtggttcttctcgttcttctagcagcggcggtggcggctctggcggcggcggtgaaattgttctgacccagagcccggcgaccctgtctttaagcccaggtgaacgtgcgacgctgtcttgtcgcgcgtctcaatctgtgtctagctcttatttagcgtggtatcaacaaaaaccaggccaagccccgcgtctgttaatttacggtgccagctctcgcgccacgggcattccggcccgttttagcggtagcggcagcggtacggattttaccttaacgattagccgcttagagccggaggactttgccgtgtactattgccaacagtacggttctagcagcccgacgttcacgttcggccaaggcaccaaagttgagatcaaa

SEQ ID NO: 676 - DNA, 750 bp, synthetic construct
  source 1..750: mol_type = other DNA
caggtgcagttagttgaaagcggcggtggtgtggtgcaaccgggtcgtagcttacgtttatcttgcgcggcctctggctttacctttagcagctatgcgatgcattgggtgcgtcaggcgccaggtaagggcttagagtgggtggcggttatctcttatgacggtagcaacaagtactacgccgatagcgttaaaggccgcttcacgattagccgcgacaacagcaaaaataccttatacttacagatgaattctttacgcgccgaggatacggccgtttattattgtgccaccggttcttaccgcaagtacgccggcggcttcgactattggggtcagtggggccagggtacgttagtgaccgtgagctctggtggttcttctcgttcttctagcagcggcggtggcggctctggcggcggcggtgaaattgttctgacccagagcccggcgaccctgtctttaagcccaggtgaacgtgcgacgctgtcttgtcgcgcgtctcaatctgtgtctagctcttatttagcgtggtatcaacaaaaaccaggccaagccccgcgtctgttaatttacggtgccagctctcgcgccacgggcattccggcccgttttagcggtagcggcagcggtacggattttaccttaacgattagccgcttagagccggaggactttgccgtgtactattgccaacagtacggtacgagcccgaatacgttcggtcaaggcacgaaagtggaaatcaaa

SEQ ID NO: 677 - DNA, 750 bp, synthetic construct
  source 1..750: mol_type = other DNA
caggtgcagttagttgaaagcggcggtggtgtggtgcaaccgggtcgtagcttacgtttatcttgcgcggcctctggctttacctttagcagctatgcgatgcattgggtgcgtcaggcgccaggtaagggcttagagtgggtggcggttatctcttatgacggtagcaacaagtactacgccgatagcgttaaaggccgcttcacgattagccgcgacaacagcaaaaataccttatacttacagatgaattctttacgcgccgaggatacggccgtttattattgtgccaccggttcttaccgcaagtacgccggcggcttcgactattggggtcagtggggccagggtacgttagtgaccgtgagctctggtggttcttctcgttcttctagcagcggcggtggcggctctggcggcggcggtgaaattgttctgacccagagcccggcgaccctgtctttaagcccaggtgaacgtgcgacgctgtcttgtcgcgcgtctcaatctgtgtctagctcttatttagcgtggtatcaacaaaaaccaggccaagccccgcgtctgttaatttacggtgccagctctcgcgccacgggcattccggcccgttttagcggtagcggcagcggtacggattttaccttaacgattagccgcttagagccggaggactttgccgtgtactattgccaacagtacaacaacccgagctggaccttcggtcaaggtaccaaggtggaaattaaa

SEQ ID NO: 678 - DNA, 756 bp, synthetic construct
  source 1..756: mol_type = other DNA
caggtgcagttagttgaaagcggcggtggtgtggtgcaaccgggtcgtagcttacgtttatcttgcgcggcctctggctttacctttagcagctatgcgatgcattgggtgcgtcaggcgccaggtaagggcttagagtgggtggcggttatctcttatgacggtagcaacaagtactacgccgatagcgttaaaggccgcttcacgattagccgcgacaacagcaaaaataccttatacttacagatgaattctttacgcgccgaggatacggccgtttattattgtgccaccggttcttaccgcaagtacgccggcggcttcgactattggggtcagtggggccagggtacgttagtgaccgtgagctctggtggttcttctcgttcttctagcagcggcggtggcggctctggcggcggcggtgaaattgttctgacccagagcccggcgaccctgtctttaagcccaggtgaacgtgcgacgctgtcttgtcgcgcgtctcaatctgtgtctagctcttatttagcgtggtatcaacaaaaaccaggccaagccccgcgtctgttaatttacggtgccagctctcgcgccacgggcattccggcccgttttagcggtagcggcagcggtacggattttaccttaacgattagccgcttagagccggaggactttgccgtgtactattgccaagtgtgggacgactctaccggcaattacgttttcggtcagggtaccaaagtggagatcaaa

SEQ ID NO: 679 - DNA, 756 bp, synthetic construct
  source 1..756: mol_type = other DNA
caggtgcagttagttgaaagcggcggtggtgtggtgcaaccgggtcgtagcttacgtttatcttgcgcggcctctggctttacctttagcagctatgcgatgcattgggtgcgtcaggcgccaggtaagggcttagagtgggtggcggttatctcttatgacggtagcaacaagtactacgccgatagcgttaaaggccgcttcacgattagccgcgacaacagcaaaaataccttatacttacagatgaattctttacgcgccgaggatacggccgtttattattgtgccaccccacaagtttctggtttaaactttgattactggggtcagtggggtcagggcaccttagttacggtgagcagcggcggttcttctcgctctagctcttctggcggcggcggtagcggcggtggcggcgaaatcgtgctgacgcagagcccggcgaccctgagcctgtctccaggcgagcgcgcgaccctgtcttgccgcgcctctcagtctgtttctagctcttatttagcgtggtaccagcagaagccaggccaagcgccacgcctgctgatttacggcgcctcttctcgtgccacgggtatcccggcgcgtttcagcggcagcggtagcggcaccgacttcaccctgaccatctctcgtctggagccagaggatttcgccgtgtactattgtcagagctacgattcttctttaagcggcccgcacgttgttttcggccaaggcaccaaagttgagatcaaa

SEQ ID NO: 680 - DNA, 747 bp, synthetic construct
  source 1..747: mol_type = other DNA
caggtgcagttagttgaaagcggcggtggtgtggtgcaaccgggtcgtagcttacgtttatcttgcgcggcctctggctttacctttagcagctatgcgatgcattgggtgcgtcaggcgccaggtaagggcttagagtgggtggcggttatctcttatgacggtagcaacaagtactacgccgatagcgttaaaggccgcttcacgattagccgcgacaacagcaaaaataccttatacttacagatgaattctttacgcgccgaggatacggccgtttattattgtgccaccccacaagtttctggtttaaactttgattactggggtcagtggggtcagggcaccttagttacggtgagcagcggcggttcttctcgctctagctcttctggcggcggcggtagcggcggtggcggcgaaatcgtgctgacgcagagcccggcgaccctgagcctgtctccaggcgagcgcgcgaccctgtcttgccgcgcctctcagtctgtttctagctcttatttagcgtggtaccagcagaagccaggccaagcgccacgcctgctgatttacggcgcctcttctcgtgccacgggtatcccggcgcgtttcagcggcagcggtagcggcaccgacttcaccctgaccatctctcgtctggagccagaggatttcgccgtgtactattgtcagagctacggcggttcttctccggtggtgttcggtcaaggtaccaaggtggaaattaaa

SEQ ID NO: 681 - DNA, 735 bp, synthetic construct
  source 1..735: mol_type = other DNA
caggtgcagttagttgaaagcggcggtggtgtggtgcaaccgggtcgtagcttacgtttatcttgcgcggcctctggctttacctttagcagctatgcgatgcattgggtgcgtcaggcgccaggtaagggcttagagtgggtggcggttatctcttatgacggtagcaacaagtactacgccgatagcgttaaaggccgcttcacgattagccgcgacaacagcaaaaataccttatacttacagatgaattctttacgcgccgaggatacggccgtttattattgtttagataacgagtctgacttctggggtcaatggggccagggtacgctggttaccgtgagctctggtggtagcagccgtagctcttcttctggtggtggcggttctggcggcggcggtgaaattgttctgacccagtctccggcgacgctgagcctgagcccgggcgaacgtgccacgctgtcttgtcgtgcgagccaaagcgtttcttctagctacttagcctggtatcaacagaagccgggtcaggcgccacgcctgttaatttacggtgcgagcagccgcgcgacgggtatcccggcccgcttctctggcagcggctctggcaccgatttcaccctgaccatctctcgtctggaaccagaggattttgccgtttactattgtggtagctgggacagcggtctgcaggactttgttttcggtcagggcaccaaggttgagatcaaa

SEQ ID NO: 682 - DNA, 747 bp, synthetic construct
  source 1..747: mol_type = other DNA
caggtgcagttagttgaaagcggcggtggtgtggtgcaaccgggtcgtagcttacgtttatcttgcgcggcctctggctttacctttagcagctatgcgatgcattgggtgcgtcaggcgccaggtaagggcttagagtgggtggcggttatctcttatgacggtagcaacaagtactacgccgatagcgttaaaggccgcttcacgattagccgcgacaacagcaaaaataccttatacttacagatgaattctttacgcgccgaggatacggccgtttattattgtatgcgccattactcttctggtccacgcgccgtggattcttggggtcagtggggtcagggcaccttagttacggtgagcagcggcggttcttctcgctctagctcttctggcggcggcggtagcggcggtggcggcgaaatcgtgctgacgcagagcccggcgaccctgagcctgtctccaggcgagcgcgcgaccctgtcttgccgcgcctctcagtctgtttctagctcttatttagcgtggtaccagcagaagccaggccaagcgccacgcctgctgatttacggcgcctcttctcgtgccacgggtatcccggcgcgtttcagcggcagcggtagcggcaccgacttcaccctgaccatctctcgtctggagccagaggatttcgccgtgtactattgtcagcagtcttattctccaccaattacctttggtcaaggtacgaaagttgaaattaaa

SEQ ID NO: 683 - DNA, 738 bp, synthetic construct
  source 1..738: mol_type = other DNA
caggtgcagttagttgaaagcggcggtggtgtggtgcaaccgggtcgtagcttacgtttatcttgcgcggcctctggctttacctttagcagctatgcgatgcattgggtgcgtcaggcgccaggtaagggcttagagtgggtggcggttatctcttatgacggtagcaacaagtactacgccgatagcgttaaaggccgcttcacgattagccgcgacaacagcaaaaataccttatacttacagatgaattctttacgcgccgaggatacggccgtttattattgtcgcaccgacaagcgcatggactactggggtcaatggggccagggtacgctggttaccgtgagctctggtggtagcagccgtagctcttcttctggtggtggcggttctggcggcggcggtgaaattgttctgacccagtctccggcgacgctgagcctgagcccgggcgaacgtgccacgctgtcttgtcgtgcgagccaaagcgtttcttctagctacttagcctggtatcaacagaagccgggtcaggcgccacgcctgttaatttacggtgcgagcagccgcgcgacgggtatcccggcccgcttctctggcagcggctctggcaccgatttcaccctgaccatctctcgtctggaaccagaggattttgccgtttactattgtcaagcgtgggacagctctaccagctcttgggtgttcggtcaaggcaccaaagttgagatcaaa

SEQ ID NO: 684 - DNA, 744 bp, synthetic construct
  source 1..744: mol_type = other DNA
caggtgcagttagttgaaagcggcggtggtgtggtgcaaccgggtcgtagcttacgtttatcttgcgcggcctctggctttacctttagcagctatgcgatgcattgggtgcgtcaggcgccaggtaagggcttagagtgggtggcggttatctcttatgacggtagcaacaagtactacgccgatagcgttaaaggccgcttcacgattagccgcgacaacagcaaaaataccttatacttacagatgaattctttacgcgccgaggatacggccgtttattattgttctaaaggtcactctacgatgcaatacttcgattattggggtcaatggggccaaggcaccctggttacggttagcagcggcggctcttctcgctcttctagctctggtggcggcggctctggcggcggtggcgaaattgttctgacccaaagcccggcgaccctgagcctgagcccaggtgaacgcgccaccctgagctgtcgtgcctctcaaagcgtttcttctagctacctggcctggtatcaacagaaaccaggtcaggccccgcgcttactgatttatggtgcgtcttctcgcgcgacgggtatcccagcgcgtttttctggcagcggctctggcaccgatttcacgctgaccatttctcgcctggaaccagaggactttgccgtttattactgcatgcaagcgggccaatggccgcgcacgttcggccagggcacgaaggttgagattaaa

SEQ ID NO: 685 - DNA, 741 bp, synthetic construct
  source 1..741: mol_type = other DNA
caggtgcagttagttgaaagcggcggtggtgtggtgcaaccgggtcgtagcttacgtttatcttgcgcggcctctggctttacctttagcagctatgcgatgcattgggtgcgtcaggcgccaggtaagggcttagagtgggtggcggttatctcttatgacggtagcaacaagtactacgccgatagcgttaaaggccgcttcacgattagccgcgacaacagcaaaaataccttatacttacagatgaattctttacgcgccgaggatacggccgtttattattgttctcgtgaccgcccagtttactctgacgtgtggggccaatggggtcagggtaccctggtgacggtttctagcggcggcagctctcgctcttcttctagcggtggtggcggcagcggtggcggcggtgaaattgtgttaacccagtctccggcgaccctgagcctgagcccgggtgagcgtgccacgctgagctgccgcgcgtctcaatctgtgtcttcttcttatttagcgtggtaccagcaaaaaccgggtcaagcgccacgtttattaatttatggcgccagctctcgcgccaccggtatcccagcccgttttagcggtagcggcagcggtaccgattttacgttaaccattagccgcttagaaccggaggacttcgcggtttactattgtcaggtttgggatagctctggcgacgttgtttttggccagggtacgaaggttgaaatcaaa

SEQ ID NO: 686 - DNA, 738 bp, synthetic construct
  source 1..738: mol_type = other DNA
caggtgcagttagttgaaagcggcggtggtgtggtgcaaccgggtcgtagcttacgtttatcttgcgcggcctctggctttacctttagcagctatgcgatgcattgggtgcgtcaggcgccaggtaagggcttagagtgggtggcggttatctcttatgacggtagcaacaagtactacgccgatagcgttaaaggccgcttcacgattagccgcgacaacagcaaaaataccttatacttacagatgaattctttacgcgccgaggatacggccgtttattattgttctaccggtcgcgcccgcgttgttgactggggccagtggggtcaaggcacgctggtgaccgtttcttctggcggcagcagccgctcttcttcttctggcggtggtggcagcggcggtggcggcgagattgtgctgacgcagagcccagcgaccctgagcctgagcccgggcgagcgcgcgacgttaagctgccgtgccagccaatctgttagctcttcttacctggcctggtatcaacagaagccgggccaagccccgcgcctgttaatctatggcgcgtctagccgcgccacgggcatcccagcccgctttagcggctctggcagcggcacggattttaccttaacgattagccgtttagagccggaagacttcgccgtgtactactgccaagcgtgggacagcagcgcccatgttgttttcggccagggcacgaaggttgagattaaa

SEQ ID NO: 687 - DNA, 741 bp, synthetic construct
  source 1..741: mol_type = other DNA
caggtgcagttagttgaaagcggcggtggtgtggtgcaaccgggtcgtagcttacgtttatcttgcgcggcctctggctttacctttagcagctatgcgatgcattgggtgcgtcaggcgccaggtaagggcttagagtgggtggcggttatctcttatgacggtagcaacaagtactacgccgatagcgttaaaggccgcttcacgattagccgcgacaacagcaaaaataccttatacttacagatgaattctttacgcgccgaggatacggccgtttattattgtacgcgtggtttaggttggaagatcgagccatggggccagtggggtcaaggcacgctggtgaccgtttcttctggcggcagcagccgctcttcttcttctggcggtggtggcagcggcggtggcggcgagattgtgctgacgcagagcccagcgaccctgagcctgagcccgggcgagcgcgcgacgttaagctgccgtgccagccaatctgttagctcttcttacctggcctggtatcaacagaagccgggccaagccccgcgcctgttaatctatggcgcgtctagccgcgccacgggcatcccagcccgctttagcggctctggcagcggcacggattttaccttaacgattagccgtttagagccggaagacttcgccgtgtactactgccaagcgtgggacagcagcccaagcgttgttttcggccagggcacgaaggttgagattaaa

SEQ ID NO: 688 - DNA, 741 bp, synthetic construct
  source 1..741: mol_type = other DNA
caggtgcagttagttgaaagcggcggtggtgtggtgcaaccgggtcgtagcttacgtttatcttgcgcggcctctggctttacctttagcagctatgcgatgcattgggtgcgtcaggcgccaggtaagggcttagagtgggtggcggttatctcttatgacggtagcaacaagtactacgccgatagcgttaaaggccgcttcacgattagccgcgacaacagcaaaaataccttatacttacagatgaattctttacgcgccgaggatacggccgtttattattgtacgcgtggtttaggttggaagatcgagccatggggccagtggggtcaaggcacgctggtgaccgtttcttctggcggcagcagccgctcttcttcttctggcggtggtggcagcggcggtggcggcgagattgtgctgacgcagagcccagcgaccctgagcctgagcccgggcgagcgcgcgacgttaagctgccgtgccagccaatctgttagctcttcttacctggcctggtatcaacagaagccgggccaagccccgcgcctgttaatctatggcgcgtctagccgcgccacgggcatcccagcccgctttagcggctctggcagcggcacggattttaccttaacgattagccgtttagagccggaagacttcgccgtgtactactgccaagcgtgggacagcaccccagcggttgttttcggccagggcacgaaggttgagattaaa

SEQ ID NO: 689 - DNA, 741 bp, synthetic construct
  source 1..741: mol_type = other DNA
caggtgcagttagttgaaagcggcggtggtgtggtgcaaccgggtcgtagcttacgtttatcttgcgcggcctctggctttacctttagcagctatgcgatgcattgggtgcgtcaggcgccaggtaagggcttagagtgggtggcggttatctcttatgacggtagcaacaagtactacgccgatagcgttaaaggccgcttcacgattagccgcgacaacagcaaaaataccttatacttacagatgaattctttacgcgccgaggatacggccgtttattattgtacgcgtggtttaggttggaagatcgagccatggggccagtggggtcaaggcacgctggtgaccgtttcttctggcggcagcagccgctcttcttcttctggcggtggtggcagcggcggtggcggcgagattgtgctgacgcagagcccagcgaccctgagcctgagcccgggcgagcgcgcgacgttaagctgccgtgccagccaatctgttagctcttcttacctggcctggtatcaacagaagccgggccaagccccgcgcctgttaatctatggcgcgtctagccgcgccacgggcatcccagcccgctttagcggctctggcagcggcacggattttaccttaacgattagccgtttagagccggaagacttcgccgtgtactactgccaaacctggggtaccggcatccaggttgttttcggccagggcacgaaggttgagattaaa

SEQ ID NO: 690 - DNA, 783 bp, synthetic construct
  source 1..783: mol_type = other DNA
caggtgcagttagttgaaagcggcggtggtgtggtgcaaccgggtcgtagcttacgtttatcttgcgcggcctctggctttacctttagcagctatgcgatgcattgggtgcgtcaggcgccaggtaagggcttagagtgggtggcggttatctcttatgacggtagcaacaagtactacgccgatagcgttaaaggccgcttcacgattagccgcgacaacagcaaaaataccttatacttacagatgaattctttacgcgccgaggatacggccgtttattattgtacgcgtcacgtttcttggtacggtgactctgcgatttactactattactatggccagccatacggtatggattattggggccagtggggtcaaggtacgttagtgacggttagcagcggcggtagcagccgcagcagcagctctggcggcggtggcagcggcggcggcggcgaaattgttttaacccaatctccggcgaccttaagcttatctccaggcgagcgcgccaccttaagctgtcgtgccagccagtctgttagctctagctacttagcgtggtatcagcaaaaaccaggtcaagcgccacgcttattaatttatggcgccagcagccgtgccaccggcattccagcccgttttagcggttctggcagcggtacggactttacgttaaccatcagccgcctggaaccagaagacttcgccgtgtattattgtcaagcctgggacacctctcatgtggtgttcggtcaaggcacgaaggtggagattaaa

SEQ ID NO: 691 - DNA, 765 bp, synthetic construct
  source 1..765: mol_type = other DNA
caggtgcagttagttgaaagcggcggtggtgtggtgcaaccgggtcgtagcttacgtttatcttgcgcggcctctggctttacctttagcagctatgcgatgcattgggtgcgtcaggcgccaggtaagggcttagagtgggtggcggttatctcttatgacggtagcaacaagtactacgccgatagcgttaaaggccgcttcacgattagccgcgacaacagcaaaaataccttatacttacagatgaattctttacgcgccgaggatacggccgtttattattgtacgaccgcccgctaccgcggttcttcttggccgagcaacatgcactattggggtcagtggggccagggtacgttagtgaccgtgagctctggtggttcttctcgttcttctagcagcggcggtggcggctctggcggcggcggtgaaattgttctgacccagagcccggcgaccctgtctttaagcccaggtgaacgtgcgacgctgtcttgtcgcgcgtctcaatctgtgtctagctcttatttagcgtggtatcaacaaaaaccaggccaagccccgcgtctgttaatttacggtgccagctctcgcgccacgggcattccggcccgttttagcggtagcggcagcggtacggattttaccttaacgattagccgcttagagccggaggactttgccgtgtactattgcggtacctgggactcttctagcctgacctctggtgttttcggccaaggcaccaaagttgagatcaaa

SEQ ID NO: 692 - DNA, 738 bp, synthetic construct
  source 1..738: mol_type = other DNA
caggtgcagttagttgaaagcggcggtggtgtggtgcaaccgggtcgtagcttacgtttatcttgcgcggcctctggctttacctttagcagctatgcgatgcattgggtgcgtcaggcgccaggtaagggcttagagtgggtggcggttatctcttatgacggtagcaacaagtactacgccgatagcgttaaaggccgcttcacgattagccgcgacaacagcaaaaataccttatacttacagatgaattctttacgcgccgaggatacggccgtttattattgtacgaccggtgccttcgactactggggtcaatggggccagggtacgctggttaccgtgagctctggtggtagcagccgtagctcttcttctggtggtggcggttctggcggcggcggtgaaattgttctgacccagtctccggcgacgctgagcctgagcccgggcgaacgtgccacgctgtcttgtcgtgcgagccaaagcgtttcttctagctacttagcctggtatcaacagaagccgggtcaggcgccacgcctgttaatttacggtgcgagcagccgcgcgacgggtatcccggcccgcttctctggcagcggctctggcaccgatttcaccctgaccatctctcgtctggaaccagaggattttgccgtttactattgtcaagtgtgggacagctctagcgatcacctggttgttttcggccagggcacgaaggttgagattaaa

SEQ ID NO: 693 - DNA, 738 bp, synthetic construct
  source 1..738: mol_type = other DNA
caggtgcagttagttgaaagcggcggtggtgtggtgcaaccgggtcgtagcttacgtttatcttgcgcggcctctggctttacctttagcagctatgcgatgcattgggtgcgtcaggcgccaggtaagggcttagagtgggtggcggttatctcttatgacggtagcaacaagtactacgccgatagcgttaaaggccgcttcacgattagccgcgacaacagcaaaaataccttatacttacagatgaattctttacgcgccgaggatacggccgtttattattgtgttggcgaccacggtttcgttcaccactggggccagtggggtcaaggcacgctggtgaccgtttcttctggcggcagcagccgctcttcttcttctggcggtggtggcagcggcggtggcggcgagattgtgctgacgcagagcccagcgaccctgagcctgagcccgggcgagcgcgcgacgttaagctgccgtgccagccaatctgttagctcttcttacctggcctggtatcaacagaagccgggccaagccccgcgcctgttaatctatggcgcgtctagccgcgccacgggcatcccagcccgctttagcggctctggcagcggcacggattttaccttaacgattagccgtttagagccggaagacttcgccgtgtactactgctctagctacaccagctctagctctgaggtttttggccagggtacgaaggttgaaatcaaa

SEQ ID NO: 694 - DNA, 741 bp, synthetic construct
  source 1..741: mol_type = other DNA
caggtgcagttagttgaaagcggcggtggtgtggtgcaaccgggtcgtagcttacgtttatcttgcgcggcctctggctttacctttagcagctatgcgatgcattgggtgcgtcaggcgccaggtaagggcttagagtgggtggcggttatctcttatgacggtagcaacaagtactacgccgatagcgttaaaggccgcttcacgattagccgcgacaacagcaaaaataccttatacttacagatgaattctttacgcgccgaggatacggccgtttattattgtgttaaagaccaacgccaaacgtggtctttcgattattggggtcaatggggccaaggcaccctggttacggttagcagcggcggctcttctcgctcttctagctctggtggcggcggctctggcggcggtggcgaaattgttctgacccaaagcccggcgaccctgagcctgagcccaggtgaacgcgccaccctgagctgtcgtgcctctcaaagcgtttcttctagctacctggcctggtatcaacagaaaccaggtcaggccccgcgcttactgatttatggtgcgtcttctcgcgcgacgggtatcccagcgcgtttttctggcagcggctctggcaccgatttcacgctgaccatttctcgcctggaaccagaggactttgccgtttattactgcggtcagtattacagctctcaaacgtttggccagggtacgaaggttgaaatcaaa

SEQ ID NO: 695 - DNA, 762 bp, synthetic construct
  source 1..762: mol_type = other DNA
caggtgcagttagttgaaagcggcggtggtgtggtgcaaccgggtcgtagcttacgtttatcttgcgcggcctctggctttacctttagcagctatgcgatgcattgggtgcgtcaggcgccaggtaagggcttagagtgggtggcggttatctcttatgacggtagcaacaagtactacgccgatagcgttaaaggccgcttcacgattagccgcgacaacagcaaaaataccttatacttacagatgaattctttacgcgccgaggatacggccgtttattattgtgttaaaaagcaccgcccaccagttaacggcgcgtcttacctgggtagctggggccagtggggtcaaggtaccctggtgaccgtttcttctggtggtagctctcgcagcagcagctctggcggcggtggcagcggcggtggcggcgagattgtgctgacccagagcccggcgacgttaagcttatctccgggcgaacgcgcgacgttatcttgccgcgcctctcagtctgtgtctagctcttatctggcctggtaccagcaaaaaccaggtcaggcgccgcgcctgttaatctacggcgcctcttctcgcgcgaccggcatcccggcgcgtttcagcggcagcggttctggcaccgatttcacgctgaccatctctcgcctggagccagaagactttgccgtgtattactgccaagtttgggacagcagcagcgaccactgggttttcggccaaggcaccaaagttgagatcaaa

SEQ ID NO: 696 - DNA, 741 bp, synthetic construct
  source 1..741: mol_type = other DNA
caggtgcagttagttgaaagcggcggtggtgtggtgcaaccgggtcgtagcttacgtttatcttgcgcggcctctggctttacctttagcagctatgcgatgcattgggtgcgtcaggcgccaggtaagggcttagagtgggtggcggttatctcttatgacggtagcaacaagtactacgccgatagcgttaaaggccgcttcacgattagccgcgacaacagcaaaaataccttatacttacagatgaattctttacgcgccgaggatacggccgtttattattgtgttaataacaacacgggttgggccttcgacatttggggccaatggggtcagggtaccctggtgacggtttctagcggcggcagctctcgctcttcttctagcggtggtggcggcagcggtggcggcggtgaaattgtgttaacccagtctccggcgaccctgagcctgagcccgggtgagcgtgccacgctgagctgccgcgcgtctcaatctgtgtcttcttcttatttagcgtggtaccagcaaaaaccgggtcaagcgccacgtttattaatttatggcgccagctctcgcgccaccggtatcccagcccgttttagcggtagcggcagcggtaccgattttacgttaaccattagccgcttagaaccggaggacttcgcggtttactattgtcagcaaagcaattctccgccaatcacgtttggccagggtacgaaggttgaaatcaaa

SEQ ID NO: 697 - DNA, 750 bp, synthetic construct
  source 1..750: mol_type = other DNA
caggtgcagttagttgaaagcggcggtggtgtggtgcaaccgggtcgtagcttacgtttatcttgcgcggcctctggctttacctttagcagctatgcgatgcattgggtgcgtcaggcgccaggtaagggcttagagtgggtggcggttatctcttatgacggtagcaacaagtactacgccgatagcgttaaaggccgcttcacgattagccgcgacaacagcaaaaataccttatacttacagatgaattctttacgcgccgaggatacggccgtttattattgtgttcgtgccttctcttactcttggccattcgatcattggggtcaatggggccaaggcaccctggttacggttagcagcggcggctcttctcgctcttctagctctggtggcggcggctctggcggcggtggcgaaattgttctgacccaaagcccggcgaccctgagcctgagcccaggtgaacgcgccaccctgagctgtcgtgcctctcaaagcgtttcttctagctacctggcctggtatcaacagaaaccaggtcaggccccgcgcttactgatttatggtgcgtcttctcgcgcgacgggtatcccagcgcgtttttctggcagcggctctggcaccgatttcacgctgaccatttctcgcctggaaccagaggactttgccgtttattactgccaacagtatggtagctcttctccaatgtatacctttggtcaaggtacgaaagttgaaattaaa

SEQ ID NO: 698 - DNA, 744 bp, synthetic construct
  source 1..744: mol_type = other DNA
caggtgcagttagttgaaagcggcggtggtgtggtgcaaccgggtcgtagcttacgtttatcttgcgcggcctctggctttacctttagcagctatgcgatgcattgggtgcgtcaggcgccaggtaagggcttagagtgggtggcggttatctcttatgacggtagcaacaagtactacgccgatagcgttaaaggccgcttcacgattagccgcgacaacagcaaaaataccttatacttacagatgaattctttacgcgccgaggatacggccgtttattattgtgttcgtgccttctcttactcttggccattcgatcattggggtcaatggggccaaggcaccctggttacggttagcagcggcggctcttctcgctcttctagctctggtggcggcggctctggcggcggtggcgaaattgttctgacccaaagcccggcgaccctgagcctgagcccaggtgaacgcgccaccctgagctgtcgtgcctctcaaagcgtttcttctagctacctggcctggtatcaacagaaaccaggtcaggccccgcgcttactgatttatggtgcgtcttctcgcgcgacgggtatcccagcgcgtttttctggcagcggctctggcaccgatttcacgctgaccatttctcgcctggaaccagaggactttgccgtttattactgccaacagtataacagctacccatggacgtttggccagggtacgaaggttgaaatcaaa

SEQ ID NO: 699 - DNA, 744 bp, synthetic construct
  source 1..744: mol_type = other DNA
caggtgcagttagttgaaagcggcggtggtgtggtgcaaccgggtcgtagcttacgtttatcttgcgcggcctctggctttacctttagcagctatgcgatgcattgggtgcgtcaggcgccaggtaagggcttagagtgggtggcggttatctcttatgacggtagcaacaagtactacgccgatagcgttaaaggccgcttcacgattagccgcgacaacagcaaaaataccttatacttacagatgaattctttacgcgccgaggatacggccgtttattattgtgttcgtgccttctcttactcttggccattcgatcattggggtcaatggggccaaggcaccctggttacggttagcagcggcggctcttctcgctcttctagctctggtggcggcggctctggcggcggtggcgaaattgttctgacccaaagcccggcgaccctgagcctgagcccaggtgaacgcgccaccctgagctgtcgtgcctctcaaagcgtttcttctagctacctggcctggtatcaacagaaaccaggtcaggccccgcgcttactgatttatggtgcgtcttctcgcgcgacgggtatcccagcgcgtttttctggcagcggctctggcaccgatttcacgctgaccatttctcgcctggaaccagaggactttgccgtttattactgccaacagtataacacctacccatggacgtttggccagggtacgaaggttgaaatcaaa

SEQ ID NO: 700 - DNA, 744 bp, synthetic construct
  source 1..744: mol_type = other DNA
caggtgcagttagttgaaagcggcggtggtgtggtgcaaccgggtcgtagcttacgtttatcttgcgcggcctctggctttacctttagcagctatgcgatgcattgggtgcgtcaggcgccaggtaagggcttagagtgggtggcggttatctcttatgacggtagcaacaagtactacgccgatagcgttaaaggccgcttcacgattagccgcgacaacagcaaaaataccttatacttacagatgaattctttacgcgccgaggatacggccgtttattattgtgttcgtgccttctcttactcttggccattcgatcattggggtcaatggggccaaggcaccctggttacggttagcagcggcggctcttctcgctcttctagctctggtggcggcggctctggcggcggtggcgaaattgttctgacccaaagcccggcgaccctgagcctgagcccaggtgaacgcgccaccctgagctgtcgtgcctctcaaagcgtttcttctagctacctggcctggtatcaacagaaaccaggtcaggccccgcgcttactgatttatggtgcgtcttctcgcgcgacgggtatcccagcgcgtttttctggcagcggctctggcaccgatttcacgctgaccatttctcgcctggaaccagaggactttgccgtttattactgccaacagtattacaattacccatggacgtttggccagggtacgaaggttgaaatcaaa

SEQ ID NO: 701 - DNA, 747 bp, synthetic construct
  source 1..747: mol_type = other DNA
caggtgcagttagttgaaagcggcggtggtgtggtgcaaccgggtcgtagcttacgtttatcttgcgcggcctctggctttacctttagcagctatgcgatgcattgggtgcgtcaggcgccaggtaagggcttagagtgggtggcggttatctcttatgacggtagcaacaagtactacgccgatagcgttaaaggccgcttcacgattagccgcgacaacagcaaaaataccttatacttacagatgaattctttacgcgccgaggatacggccgtttattattgtgttcgtgccttctcttactcttggccattcgatcattggggtcaatggggccaaggcaccctggttacggttagcagcggcggctcttctcgctcttctagctctggtggcggcggctctggcggcggtggcgaaattgttctgacccaaagcccggcgaccctgagcctgagcccaggtgaacgcgccaccctgagctgtcgtgcctctcaaagcgtttcttctagctacctggcctggtatcaacagaaaccaggtcaggccccgcgcttactgatttatggtgcgtcttctcgcgcgacgggtatcccagcgcgtttttctggcagcggctctggcaccgatttcacgctgaccatttctcgcctggaaccagaggactttgccgtttattactgccaacagtattacagctctccaccagtgagctttggtcaaggtacgaaagttgaaattaaa

SEQ ID NO: 702 - DNA, 747 bp, synthetic construct
  source 1..747: mol_type = other DNA
caggtgcagttagttgaaagcggcggtggtgtggtgcaaccgggtcgtagcttacgtttatcttgcgcggcctctggctttacctttagcagctatgcgatgcattgggtgcgtcaggcgccaggtaagggcttagagtgggtggcggttatctcttatgacggtagcaacaagtactacgccgatagcgttaaaggccgcttcacgattagccgcgacaacagcaaaaataccttatacttacagatgaattctttacgcgccgaggatacggccgtttattattgtgttcgtgccttctcttactcttggccattcgatcattggggtcaatggggccaaggcaccctggttacggttagcagcggcggctcttctcgctcttctagctctggtggcggcggctctggcggcggtggcgaaattgttctgacccaaagcccggcgaccctgagcctgagcccaggtgaacgcgccaccctgagctgtcgtgcctctcaaagcgtttcttctagctacctggcctggtatcaacagaaaccaggtcaggccccgcgcttactgatttatggtgcgtcttctcgcgcgacgggtatcccagcgcgtttttctggcagcggctctggcaccgatttcacgctgaccatttctcgcctggaaccagaggactttgccgtttattactgccaaagcccggacagctctggtaactgggtgtttggccaaggtacgaaggtggagattaaa

SEQ ID NO: 703 - DNA, 771 bp, synthetic construct
  source 1..771: mol_type = other DNA
caggtgcagttagttgaaagcggcggtggtgtggtgcaaccgggtcgtagcttacgtttatcttgcgcggcctctggctttacctttagcagctatgcgatgcattgggtgcgtcaggcgccaggtaagggcttagagtgggtggcggttatctcttatgacggtagcaacaagtactacgccgatagcgttaaaggccgcttcacgattagccgcgacaacagcaaaaataccttatacttacagatgaattctttacgcgccgaggatacggccgtttattattgtgttcgtgaccgcaactactaccgctcttattggaaaggtgacgtgttcgatatttggggccaatggggtcaaggcaccctggtgacggtttcttctggtggctcttctcgtagcagctctagcggcggtggcggcagcggtggcggcggtgaaattgtgctgacccagagcccggccacgctgtctttaagcccgggcgagcgtgccacgttaagctgtcgcgccagccaaagcgttagctctagctatttagcctggtatcaacagaagccaggccaggcgccacgtttattaatctatggtgcctcttctcgtgcgaccggtattccggcgcgctttagcggctctggtagcggcaccgacttcaccctgacgatctctcgtttagagccggaggatttcgcggtgtactattgtaactctagcgatagctacggtggtaacaccgttgtgtttggccaaggtacgaaagttgagattaaa

SEQ ID NO: 704 - DNA, 759 bp, synthetic construct
  source 1..759: mol_type = other DNA
caggtgcagttagttgaaagcggcggtggtgtggtgcaaccgggtcgtagcttacgtttatcttgcgcggcctctggctttacctttagcagctatgcgatgcattgggtgcgtcaggcgccaggtaagggcttagagtgggtggcggttatctcttatgacggtagcaacaagtactacgccgatagcgttaaaggccgcttcacgattagccgcgacaacagcaaaaataccttatacttacagatgaattctttacgcgccgaggatacggccgtttattattgtgttcgtgactctggtggttaccgcgaccagccgggttactatttagattattggggccaatggggtcaaggcaccctggtgacggtttcttctggtggctcttctcgtagcagctctagcggcggtggcggcagcggtggcggcggtgaaattgtgctgacccagagcccggccacgctgtctttaagcccgggcgagcgtgccacgttaagctgtcgcgccagccaaagcgttagctctagctatttagcctggtatcaacagaagccaggccaggcgccacgtttattaatctatggtgcctcttctcgtgcgaccggtattccggcgcgctttagcggctctggtagcggcaccgacttcaccctgacgatctctcgtttagagccggaggatttcgcggtgtactattgtcaacaatatgattttacgccaccaacgtttggtcagggcaccaaggttgagattaaa

SEQ ID NO: 705 - DNA, 744 bp, synthetic construct
  source 1..744: mol_type = other DNA
caggtgcagttagttgaaagcggcggtggtgtggtgcaaccgggtcgtagcttacgtttatcttgcgcggcctctggctttacctttagcagctatgcgatgcattgggtgcgtcaggcgccaggtaagggcttagagtgggtggcggttatctcttatgacggtagcaacaagtactacgccgatagcgttaaaggccgcttcacgattagccgcgacaacagcaaaaataccttatacttacagatgaattctttacgcgccgaggatacggccgtttattattgtgttcgtgactacgactactctcaagttggccattggggtcaatggggccaaggcaccctggttacggttagcagcggcggctcttctcgctcttctagctctggtggcggcggctctggcggcggtggcgaaattgttctgacccaaagcccggcgaccctgagcctgagcccaggtgaacgcgccaccctgagctgtcgtgcctctcaaagcgtttcttctagctacctggcctggtatcaacagaaaccaggtcaggccccgcgcttactgatttatggtgcgtcttctcgcgcgacgggtatcccagcgcgtttttctggcagcggctctggcaccgatttcacgctgaccatttctcgcctggaaccagaggactttgccgtttattactgccaagcgtgggattctaccacggaccgcgtgtttggccaaggtacgaaggtggagattaaa

SEQ ID NO: 706 - DNA, 750 bp, synthetic construct
  source 1..750: mol_type = other DNA
caggtgcagttagttgaaagcggcggtggtgtggtgcaaccgggtcgtagcttacgtttatcttgcgcggcctctggctttacctttagcagctatgcgatgcattgggtgcgtcaggcgccaggtaagggcttagagtgggtggcggttatctcttatgacggtagcaacaagtactacgccgatagcgttaaaggccgcttcacgattagccgcgacaacagcaaaaataccttatacttacagatgaattctttacgcgccgaggatacggccgtttattattgtgttcgtgagggtttctctggtacgtggacggcgtttgacatctggggccaatggggccagggcacgttagttaccgtgagcagcggtggttcttctcgcagctcttctagcggcggcggtggcagcggtggcggcggcgagattgtgttaacccagagcccggcgaccctgagcttatctccgggtgagcgtgcgaccttaagctgtcgcgccagccaatctgttagctctagctacctggcctggtatcagcaaaagccgggtcaggccccacgtctgctgatctatggtgcctctagccgcgccacgggtattccggcgcgctttagcggctctggcagcggcacggactttaccctgacgatcagccgtttagagccagaagacttcgcggtttattactgccagcaagaagactctccaccgattaccttcggtcaaggtaccaaggtggaaattaaa

SEQ ID NO: 707 - DNA, 768 bp, synthetic construct
  source 1..768: mol_type = other DNA
caggtgcagttagttgaaagcggcggtggtgtggtgcaaccgggtcgtagcttacgtttatcttgcgcggcctctggctttacctttagcagctatgcgatgcattgggtgcgtcaggcgccaggtaagggcttagagtgggtggcggttatctcttatgacggtagcaacaagtactacgccgatagcgttaaaggccgcttcacgattagccgcgacaacagcaaaaataccttatacttacagatgaattctttacgcgccgaggatacggccgtttattattgtgttcgtcacgccttcttctacggttactatcaggacgacgcgttcgatgtgtggggccaatggggtcaaggcaccctggtgacggtttcttctggtggctcttctcgtagcagctctagcggcggtggcggcagcggtggcggcggtgaaattgtgctgacccagagcccggccacgctgtctttaagcccgggcgagcgtgccacgttaagctgtcgcgccagccaaagcgttagctctagctatttagcctggtatcaacagaagccaggccaggcgccacgtttattaatctatggtgcctcttctcgtgcgaccggtattccggcgcgctttagcggctctggtagcggcaccgacttcaccctgacgatctctcgtttagagccggaggatttcgcggtgtactattgtggtacgtgggatagcagccgcttaccagcctatgtttttggccagggtacgaaggtggagatcaaa

SEQ ID NO: 708 - DNA, 750 bp, synthetic construct
  source 1..750: mol_type = other DNA
caggtgcagttagttgaaagcggcggtggtgtggtgcaaccgggtcgtagcttacgtttatcttgcgcggcctctggctttacctttagcagctatgcgatgcattgggtgcgtcaggcgccaggtaagggcttagagtgggtggcggttatctcttatgacggtagcaacaagtactacgccgatagcgttaaaggccgcttcacgattagccgcgacaacagcaaaaataccttatacttacagatgaattctttacgcgccgaggatacggccgtttattattgtgttcgtatcttattcggtttcaagggtatggatgtgtggggtcaatggggccaaggcaccctggttacggttagcagcggcggctcttctcgctcttctagctctggtggcggcggctctggcggcggtggcgaaattgttctgacccaaagcccggcgaccctgagcctgagcccaggtgaacgcgccaccctgagctgtcgtgcctctcaaagcgtttcttctagctacctggcctggtatcaacagaaaccaggtcaggccccgcgcttactgatttatggtgcgtcttctcgcgcgacgggtatcccagcgcgtttttctggcagcggctctggcaccgatttcacgctgaccatttctcgcctggaaccagaggactttgccgtttattactgccaagtgtgggatcgcagcacggacttagtggtgtttggtcaaggtacgaaagttgaaattaaa

SEQ ID NO: 709 - DNA, 750 bp, synthetic construct
  source 1..750: mol_type = other DNA
caggtgcagttagttgaaagcggcggtggtgtggtgcaaccgggtcgtagcttacgtttatcttgcgcggcctctggctttacctttagcagctatgcgatgcattgggtgcgtcaggcgccaggtaagggcttagagtgggtggcggttatctcttatgacggtagcaacaagtactacgccgatagcgttaaaggccgcttcacgattagccgcgacaacagcaaaaataccttatacttacagatgaattctttacgcgccgaggatacggccgtttattattgtgttcgtaagggtcgctctgttcgcggtgcggattactggggtcagtggggtcagggcaccttagttacggtgagcagcggcggttcttctcgctctagctcttctggcggcggcggtagcggcggtggcggcgaaatcgtgctgacgcagagcccggcgaccctgagcctgtctccaggcgagcgcgcgaccctgtcttgccgcgcctctcagtctgtttctagctcttatttagcgtggtaccagcagaagccaggccaagcgccacgcctgctgatttacggcgcctcttctcgtgccacgggtatcccggcgcgtttcagcggcagcggtagcggcaccgacttcaccctgaccatctctcgtctggagccagaggatttcgccgtgtactattgtcaggtgtgggacagctcttctgaccattgggtgtttggtcaaggtacgaaagttgaaattaaa

SEQ ID NO: 710 - DNA, 750 bp, synthetic construct
  source 1..750: mol_type = other DNA
caggtgcagttagttgaaagcggcggtggtgtggtgcaaccgggtcgtagcttacgtttatcttgcgcggcctctggctttacctttagcagctatgcgatgcattgggtgcgtcaggcgccaggtaagggcttagagtgggtggcggttatctcttatgacggtagcaacaagtactacgccgatagcgttaaaggccgcttcacgattagccgcgacaacagcaaaaataccttatacttacagatgaattctttacgcgccgaggatacggccgtttattattgtgttcgtttaggtacggccgttaacacgagcctgttcgacatttggggtcagtggggccagggtacgttagtgaccgtgagctctggtggttcttctcgttcttctagcagcggcggtggcggctctggcggcggcggtgaaattgttctgacccagagcccggcgaccctgtctttaagcccaggtgaacgtgcgacgctgtcttgtcgcgcgtctcaatctgtgtctagctcttatttagcgtggtatcaacaaaaaccaggccaagccccgcgtctgttaatttacggtgccagctctcgcgccacgggcattccggcccgttttagcggtagcggcagcggtacggattttaccttaacgattagccgcttagagccggaggactttgccgtgtactattgccaacagaacgacacgagcccgcgtacgttcggtcaaggcacgaaagtggaaatcaaa

SEQ ID NO: 711 - DNA, 747 bp, synthetic construct
  source 1..747: mol_type = other DNA
caggtgcagttagttgaaagcggcggtggtgtggtgcaaccgggtcgtagcttacgtttatcttgcgcggcctctggctttacctttagcagctatgcgatgcattgggtgcgtcaggcgccaggtaagggcttagagtgggtggcggttatctcttatgacggtagcaacaagtactacgccgatagcgttaaaggccgcttcacgattagccgcgacaacagcaaaaataccttatacttacagatgaattctttacgcgccgaggatacggccgtttattattgtgttcgtatgcaacgctacggtatggacgtttggggtcagtggggccaaggtaccttagtgaccgtgtcttctggtggcagcagccgttcttcttcttctggtggcggtggtagcggcggcggtggcgaaatcgtgctgacccaaagcccggccaccctgagcctgagcccgggcgaacgcgccaccttatcttgccgtgcgtctcagtctgtttctagctcttacttagcgtggtaccagcaaaaaccaggccaggccccacgtttactgatctacggcgcgagctctcgtgccacgggtattccagcccgcttcagcggcagcggtagcggcaccgactttaccctgacgatcagccgtctggagccagaagatttcgccgtttattactgtggcacgtgggattctagcagctctcatttaaaggtttttggccagggtacgaaggttgaaatcaaa

SEQ ID NO: 712 - DNA, 747 bp, synthetic construct
  source 1..747: mol_type = other DNA
caggtgcagttagttgaaagcggcggtggtgtggtgcaaccgggtcgtagcttacgtttatcttgcgcggcctctggctttacctttagcagctatgcgatgcattgggtgcgtcaggcgccaggtaagggcttagagtgggtggcggttatctcttatgacggtagcaacaagtactacgccgatagcgttaaaggccgcttcacgattagccgcgacaacagcaaaaataccttatacttacagatgaattctttacgcgccgaggatacggccgtttattattgtgttcgtaaccgcggttggcaacaattcgactattggggccaatggggtcagggtaccctggtgacggtttctagcggcggcagctctcgctcttcttctagcggtggtggcggcagcggtggcggcggtgaaattgtgttaacccagtctccggcgaccctgagcctgagcccgggtgagcgtgccacgctgagctgccgcgcgtctcaatctgtgtcttcttcttatttagcgtggtaccagcaaaaaccgggtcaagcgccacgtttattaatttatggcgccagctctcgcgccaccggtatcccagcccgttttagcggtagcggcagcggtaccgattttacgttaaccattagccgcttagaaccggaggacttcgcggtttactattgtcagtctctggattctggcttaaagtcttgggtgtttggccaaggtacgaaggtggagattaaa

SEQ ID NO: 713 - DNA, 753 bp, synthetic construct
  source 1..753: mol_type = other DNA
caggtgcagttagttgaaagcggcggtggtgtggtgcaaccgggtcgtagcttacgtttatcttgcgcggcctctggctttacctttagcagctatgcgatgcattgggtgcgtcaggcgccaggtaagggcttagagtgggtggcggttatctcttatgacggtagcaacaagtactacgccgatagcgttaaaggccgcttcacgattagccgcgacaacagcaaaaataccttatacttacagatgaattctttacgcgccgaggatacggccgtttattattgtgttcgtccattatcttggggtgcctactaccgtgcgttagacgattggggtcagtggggccagggtacgttagtgaccgtgagctctggtggttcttctcgttcttctagcagcggcggtggcggctctggcggcggcggtgaaattgttctgacccagagcccggcgaccctgtctttaagcccaggtgaacgtgcgacgctgtcttgtcgcgcgtctcaatctgtgtctagctcttatttagcgtggtatcaacaaaaaccaggccaagccccgcgtctgttaatttacggtgccagctctcgcgccacgggcattccggcccgttttagcggtagcggcagcggtacggattttaccttaacgattagccgcttagagccggaggactttgccgtgtactattgccaacagtactactctccgctgccgacgttcggtcaaggcacgaaagtggaaatcaaa

SEQ ID NO: 714 - DNA, 765 bp, synthetic construct
  source 1..765: mol_type = other DNA
caggtgcagttagttgaaagcggcggtggtgtggtgcaaccgggtcgtagcttacgtttatcttgcgcggcctctggctttacctttagcagctatgcgatgcattgggtgcgtcaggcgccaggtaagggcttagagtgggtggcggttatctcttatgacggtagcaacaagtactacgccgatagcgttaaaggccgcttcacgattagccgcgacaacagcaaaaataccttatacttacagatgaattctttacgcgccgaggatacggccgtttattattgtgttcgtcgcccacgctggttcgactctgcctattatgccccatttgagaattggggccagtggggtcaaggtaccctggtgaccgtttcttctggtggtagctctcgcagcagcagctctggcggcggtggcagcggcggtggcggcgagattgtgctgacccagagcccggcgacgttaagcttatctccgggcgaacgcgcgacgttatcttgccgcgcctctcagtctgtgtctagctcttatctggcctggtaccagcaaaaaccaggtcaggcgccgcgcctgttaatctacggcgcctcttctcgcgcgaccggcatcccggcgcgtttcagcggcagcggttctggcaccgatttcacgctgaccatctctcgcctggagccagaagactttgccgtgtattactgcgagacgtgggacagccgtcgtaacgccgttgtttttggtcagggcaccaaggttgagattaaa

SEQ ID NO: 715 - DNA, 759 bp, synthetic construct
  source 1..759: mol_type = other DNA
caggtgcagttagttgaaagcggcggtggtgtggtgcaaccgggtcgtagcttacgtttatcttgcgcggcctctggctttacctttagcagctatgcgatgcattgggtgcgtcaggcgccaggtaagggcttagagtgggtggcggttatctcttatgacggtagcaacaagtactacgccgatagcgttaaaggccgcttcacgattagccgcgacaacagcaaaaataccttatacttacagatgaattctttacgcgccgaggatacggccgtttattattgtgttcgtcgcccacgctggttcgactctgcctattatgccccatttgagaattggggccagtggggtcaaggtaccctggtgaccgtttcttctggtggtagctctcgcagcagcagctctggcggcggtggcagcggcggtggcggcgagattgtgctgacccagagcccggcgacgttaagcttatctccgggcgaacgcgcgacgttatcttgccgcgcctctcagtctgtgtctagctcttatctggcctggtaccagcaaaaaccaggtcaggcgccgcgcctgttaatctacggcgcctcttctcgcgcgaccggcatcccggcgcgtttcagcggcagcggttctggcaccgatttcacgctgaccatctctcgcctggagccagaagactttgccgtgtattactgccaacaacgcagcaaatggccgttaatcttcggtcagggtaccaaagtggagatcaaa

SEQ ID NO: 716 - DNA, 744 bp, synthetic construct
  source 1..744: mol_type = other DNA
caggtgcagttagttgaaagcggcggtggtgtggtgcaaccgggtcgtagcttacgtttatcttgcgcggcctctggctttacctttagcagctatgcgatgcattgggtgcgtcaggcgccaggtaagggcttagagtgggtggcggttatctcttatgacggtagcaacaagtactacgccgatagcgttaaaggccgcttcacgattagccgcgacaacagcaaaaataccttatacttacagatgaattctttacgcgccgaggatacggccgtttattattgtgttaccgactcttacacggccacggccccggatcactggggtcagtggggtcagggcaccttagttacggtgagcagcggcggttcttctcgctctagctcttctggcggcggcggtagcggcggtggcggcgaaatcgtgctgacgcagagcccggcgaccctgagcctgtctccaggcgagcgcgcgaccctgtcttgccgcgcctctcagtctgtttctagctcttatttagcgtggtaccagcagaagccaggccaagcgccacgcctgctgatttacggcgcctcttctcgtgccacgggtatcccggcgcgtttcagcggcagcggtagcggcaccgacttcaccctgaccatctctcgtctggagccagaggatttcgccgtgtactattgtcagcaggactattctccaccaccgacctttggtcaaggtacgaaagttgaaattaaa

SEQ ID NO: 717 - DNA, 756 bp, synthetic construct
  source 1..756: mol_type = other DNA
caggtgcagttagttgaaagcggcggtggtgtggtgcaaccgggtcgtagcttacgtttatcttgcgcggcctctggctttacctttagcagctatgcgatgcattgggtgcgtcaggcgccaggtaagggcttagagtgggtggcggttatctcttatgacggtagcaacaagtactacgccgatagcgttaaaggccgcttcacgattagccgcgacaacagcaaaaataccttatacttacagatgaattctttacgcgccgaggatacggccgtttattattgtgccgcggccaagaacggtgcctctttaggcgtgaacttatggggccaatggggccagggcacgttagttaccgtgagcagcggtggttcttctcgcagctcttctagcggcggcggtggcagcggtggcggcggcgagattgtgttaacccagagcccggcgaccctgagcttatctccgggtgagcgtgcgaccttaagctgtcgcgccagccaatctgttagctctagctacctggcctggtatcagcaaaagccgggtcaggccccacgtctgctgatctatggtgcctctagccgcgccacgggtattccggcgcgctttagcggctctggcagcggcacggactttaccctgacgatcagccgtttagagccagaagacttcgcggtttattactgcggcacgtgggattcttcttctccgagcggctacgttttcggtcagggtaccaaagtggagatcaaa

SEQ ID NO: 718 - DNA, 753 bp, synthetic construct
  source 1..753: mol_type = other DNA
caggtgcagttagttgaaagcggcggtggtgtggtgcaaccgggtcgtagcttacgtttatcttgcgcggcctctggctttacctttagcagctatgcgatgcattgggtgcgtcaggcgccaggtaagggcttagagtgggtggcggttatctcttatgacggtagcaacaagtactacgccgatagcgttaaaggccgcttcacgattagccgcgacaacagcaaaaataccttatacttacagatgaattctttacgcgccgaggatacggccgtttattattgtgccgcggccaagaacggtgcctctttaggcgtgaacttatggggccaatggggccagggcacgttagttaccgtgagcagcggtggttcttctcgcagctcttctagcggcggcggtggcagcggtggcggcggcgagattgtgttaacccagagcccggcgaccctgagcttatctccgggtgagcgtgcgaccttaagctgtcgcgccagccaatctgttagctctagctacctggcctggtatcagcaaaagccgggtcaggccccacgtctgctgatctatggtgcctctagccgcgccacgggtattccggcgcgctttagcggctctggcagcggcacggactttaccctgacgatcagccgtttagagccagaagacttcgcggtttattactgccagtcttatgaccgctctcgtcgtggcgttgttttcggtcagggtaccaaagtggagatcaaa

SEQ ID NO: 719 - DNA, 747 bp, synthetic construct
  source 1..747: mol_type = other DNA
caggtgcagttagttgaaagcggcggtggtgtggtgcaaccgggtcgtagcttacgtttatcttgcgcggcctctggctttacctttagcagctatgcgatgcattgggtgcgtcaggcgccaggtaagggcttagagtgggtggcggttatctcttatgacggtagcaacaagtactacgccgatagcgttaaaggccgcttcacgattagccgcgacaacagcaaaaataccttatacttacagatgaattctttacgcgccgaggatacggccgtttattattgtgccgcggccaagaacggtgcctctttaggcgtgaacttatggggccaatggggccagggcacgttagttaccgtgagcagcggtggttcttctcgcagctcttctagcggcggcggtggcagcggtggcggcggcgagattgtgttaacccagagcccggcgaccctgagcttatctccgggtgagcgtgcgaccttaagctgtcgcgccagccaatctgttagctctagctacctggcctggtatcagcaaaagccgggtcaggccccacgtctgctgatctatggtgcctctagccgcgccacgggtattccggcgcgctttagcggctctggcagcggcacggactttaccctgacgatcagccgtttagagccagaagacttcgcggtttattactgccagacgtgggatacgtctacggtggtgtttggtcaaggtacgaaagttgaaattaaa

SEQ ID NO: 720 - DNA, 750 bp, synthetic construct
  source 1..750: mol_type = other DNA
caggtgcagttagttgaaagcggcggtggtgtggtgcaaccgggtcgtagcttacgtttatcttgcgcggcctctggctttacctttagcagctatgcgatgcattgggtgcgtcaggcgccaggtaagggcttagagtgggtggcggttatctcttatgacggtagcaacaagtactacgccgatagcgttaaaggccgcttcacgattagccgcgacaacagcaaaaataccttatacttacagatgaattctttacgcgccgaggatacggccgtttattattgtgccgcggccaagaacggtgcctctttaggcgtgaacttatggggccaatggggccagggcacgttagttaccgtgagcagcggtggttcttctcgcagctcttctagcggcggcggtggcagcggtggcggcggcgagattgtgttaacccagagcccggcgaccctgagcttatctccgggtgagcgtgcgaccttaagctgtcgcgccagccaatctgttagctctagctacctggcctggtatcagcaaaagccgggtcaggccccacgtctgctgatctatggtgcctctagccgcgccacgggtattccggcgcgctttagcggctctggcagcggcacggactttaccctgacgatcagccgtttagagccagaagacttcgcggtttattactgccagacgtggggcccaggtatccatgtggtgttcggtcaaggtaccaaggtggaaattaaa

SEQ ID NO: 721 - DNA, 735 bp, synthetic construct
  source 1..735: mol_type = other DNA
caggtgcagttagttgaaagcggcggtggtgtggtgcaaccgggtcgtagcttacgtttatcttgcgcggcctctggctttacctttagcagctatgcgatgcattgggtgcgtcaggcgccaggtaagggcttagagtgggtggcggttatctcttatgacggtagcaacaagtactacgccgatagcgttaaaggccgcttcacgattagccgcgacaacagcaaaaataccttatacttacagatgaattctttacgcgccgaggatacggccgtttattattgtgccgatttacaatacgactactggggtcaatggggccagggtacgctggttaccgtgagctctggtggtagcagccgtagctcttcttctggtggtggcggttctggcggcggcggtgaaattgttctgacccagtctccggcgacgctgagcctgagcccgggcgaacgtgccacgctgtcttgtcgtgcgagccaaagcgtttcttctagctacttagcctggtatcaacagaagccgggtcaggcgccacgcctgttaatttacggtgcgagcagccgcgcgacgggtatcccggcccgcttctctggcagcggctctggcaccgatttcaccctgaccatctctcgtctggaaccagaggattttgccgtttactattgtgccgcgtgggacgattctaataatgacccggttttcggtcagggcaccaaggttgagatcaaa

SEQ ID NO: 722 - DNA, 729 bp, synthetic construct
  source 1..729: mol_type = other DNA
caggtgcagttagttgaaagcggcggtggtgtggtgcaaccgggtcgtagcttacgtttatcttgcgcggcctctggctttacctttagcagctatgcgatgcattgggtgcgtcaggcgccaggtaagggcttagagtgggtggcggttatctcttatgacggtagcaacaagtactacgccgatagcgttaaaggccgcttcacgattagccgcgacaacagcaaaaataccttatacttacagatgaattctttacgcgccgaggatacggccgtttattattgtgccgatttacaatacgactactggggtcaatggggccagggtacgctggttaccgtgagctctggtggtagcagccgtagctcttcttctggtggtggcggttctggcggcggcggtgaaattgttctgacccagtctccggcgacgctgagcctgagcccgggcgaacgtgccacgctgtcttgtcgtgcgagccaaagcgtttcttctagctacttagcctggtatcaacagaagccgggtcaggcgccacgcctgttaatttacggtgcgagcagccgcgcgacgggtatcccggcccgcttctctggcagcggctctggcaccgatttcaccctgaccatctctcgtctggaaccagaggattttgccgtttactattgtcaccagtacgattctagcccggagaccttcggtcaaggcaccaaagttgagatcaaa

SEQ ID NO: 723 - DNA, 729 bp, synthetic construct
  source 1..729: mol_type = other DNA
caggtgcagttagttgaaagcggcggtggtgtggtgcaaccgggtcgtagcttacgtttatcttgcgcggcctctggctttacctttagcagctatgcgatgcattgggtgcgtcaggcgccaggtaagggcttagagtgggtggcggttatctcttatgacggtagcaacaagtactacgccgatagcgttaaaggccgcttcacgattagccgcgacaacagcaaaaataccttatacttacagatgaattctttacgcgccgaggatacggccgtttattattgtgccgatttacaatacgactactggggtcaatggggccagggtacgctggttaccgtgagctctggtggtagcagccgtagctcttcttctggtggtggcggttctggcggcggcggtgaaattgttctgacccagtctccggcgacgctgagcctgagcccgggcgaacgtgccacgctgtcttgtcgtgcgagccaaagcgtttcttctagctacttagcctggtatcaacagaagccgggtcaggcgccacgcctgttaatttacggtgcgagcagccgcgcgacgggtatcccggcccgcttctctggcagcggctctggcaccgatttcaccctgaccatctctcgtctggaaccagaggattttgccgtttactattgtcaacagtacggcacggcgccgatcgcgttcggtcaaggcaccaaagttgagatcaaa

SEQ ID NO: 724 - DNA, 732 bp, synthetic construct
  source 1..732: mol_type = other DNA
caggtgcagttagttgaaagcggcggtggtgtggtgcaaccgggtcgtagcttacgtttatcttgcgcggcctctggctttacctttagcagctatgcgatgcattgggtgcgtcaggcgccaggtaagggcttagagtgggtggcggttatctcttatgacggtagcaacaagtactacgccgatagcgttaaaggccgcttcacgattagccgcgacaacagcaaaaataccttatacttacagatgaattctttacgcgccgaggatacggccgtttattattgtgccgatttacaatacgactactggggtcaatggggccagggtacgctggttaccgtgagctctggtggtagcagccgtagctcttcttctggtggtggcggttctggcggcggcggtgaaattgttctgacccagtctccggcgacgctgagcctgagcccgggcgaacgtgccacgctgtcttgtcgtgcgagccaaagcgtttcttctagctacttagcctggtatcaacagaagccgggtcaggcgccacgcctgttaatttacggtgcgagcagccgcgcgacgggtatcccggcccgcttctctggcagcggctctggcaccgatttcaccctgaccatctctcgtctggaaccagaggattttgccgtttactattgttacagctgggacagcacggataccgttgtgttcggtcaaggcaccaaagttgagatcaaa

SEQ ID NO: 725 - DNA, 747 bp, synthetic construct
  source 1..747: mol_type = other DNA
caggtgcagttagttgaaagcggcggtggtgtggtgcaaccgggtcgtagcttacgtttatcttgcgcggcctctggctttacctttagcagctatgcgatgcattgggtgcgtcaggcgccaggtaagggcttagagtgggtggcggttatctcttatgacggtagcaacaagtactacgccgatagcgttaaaggccgcttcacgattagccgcgacaacagcaaaaataccttatacttacagatgaattctttacgcgccgaggatacggccgtttattattgtgccgatacggcctactctttaccaggtgatatttggggtcaatggggccaaggcaccctggttacggttagcagcggcggctcttctcgctcttctagctctggtggcggcggctctggcggcggtggcgaaattgttctgacccaaagcccggcgaccctgagcctgagcccaggtgaacgcgccaccctgagctgtcgtgcctctcaaagcgtttcttctagctacctggcctggtatcaacagaaaccaggtcaggccccgcgcttactgatttatggtgcgtcttctcgcgcgacgggtatcccagcgcgtttttctggcagcggctctggcaccgatttcacgctgaccatttctcgcctggaaccagaggactttgccgtttattactgccaagtgtgggattctagctctgaccactgggtgtttggccaaggtacgaaggtggagattaaa

SEQ ID NO: 726 - DNA, 747 bp, synthetic construct
  source 1..747: mol_type = other DNA
caggtgcagttagttgaaagcggcggtggtgtggtgcaaccgggtcgtagcttacgtttatcttgcgcggcctctggctttacctttagcagctatgcgatgcattgggtgcgtcaggcgccaggtaagggcttagagtgggtggcggttatctcttatgacggtagcaacaagtactacgccgatagcgttaaaggccgcttcacgattagccgcgacaacagcaaaaataccttatacttacagatgaattctttacgcgccgaggatacggccgtttattattgtgccgatacggcctactctttaccaggtgattattggggtcaatggggccaaggcaccctggttacggttagcagcggcggctcttctcgctcttctagctctggtggcggcggctctggcggcggtggcgaaattgttctgacccaaagcccggcgaccctgagcctgagcccaggtgaacgcgccaccctgagctgtcgtgcctctcaaagcgtttcttctagctacctggcctggtatcaacagaaaccaggtcaggccccgcgcttactgatttatggtgcgtcttctcgcgcgacgggtatcccagcgcgtttttctggcagcggctctggcaccgatttcacgctgaccatttctcgcctggaaccagaggactttgccgtttattactgccaagtgtgggataacaattctgacttatgggtgtttggccaaggtacgaaggtggagattaaa

SEQ ID NO: 727 - DNA, 735 bp, synthetic construct
  source 1..735: mol_type = other DNA
caggtgcagttagttgaaagcggcggtggtgtggtgcaaccgggtcgtagcttacgtttatcttgcgcggcctctggctttacctttagcagctatgcgatgcattgggtgcgtcaggcgccaggtaagggcttagagtgggtggcggttatctcttatgacggtagcaacaagtactacgccgatagcgttaaaggccgcttcacgattagccgcgacaacagcaaaaataccttatacttacagatgaattctttacgcgccgaggatacggccgtttattattgtgccggcgttggtcgcatcttcccatactggggccagtggggtcaaggcacgctggtgaccgtttcttctggcggcagcagccgctcttcttcttctggcggtggtggcagcggcggtggcggcgagattgtgctgacgcagagcccagcgaccctgagcctgagcccgggcgagcgcgcgacgttaagctgccgtgccagccaatctgttagctcttcttacctggcctggtatcaacagaagccgggccaagccccgcgcctgttaatctatggcgcgtctagccgcgccacgggcatcccagcccgctttagcggctctggcagcggcacggattttaccttaacgattagccgtttagagccggaagacttcgccgtgtactactgccaacagtcttatagcacgccgttaacgttcggccagggcacgaaggttgagattaaa

SEQ ID NO: 728 - DNA, 744 bp, synthetic construct
  source 1..744: mol_type = other DNA
caggtgcagttagttgaaagcggcggtggtgtggtgcaaccgggtcgtagcttacgtttatcttgcgcggcctctggctttacctttagcagctatgcgatgcattgggtgcgtcaggcgccaggtaagggcttagagtgggtggcggttatctcttatgacggtagcaacaagtactacgccgatagcgttaaaggccgcttcacgattagccgcgacaacagcaaaaataccttatacttacagatgaattctttacgcgccgaggatacggccgtttattattgtgccaaagccggtgccgtttggttagactactggggccagtggggtcaaggcacgctggtgaccgtttcttctggcggcagcagccgctcttcttcttctggcggtggtggcagcggcggtggcggcgagattgtgctgacgcagagcccagcgaccctgagcctgagcccgggcgagcgcgcgacgttaagctgccgtgccagccaatctgttagctcttcttacctggcctggtatcaacagaagccgggccaagccccgcgcctgttaatctatggcgcgtctagccgcgccacgggcatcccagcccgctttagcggctctggcagcggcacggattttaccttaacgattagccgtttagagccggaagacttcgccgtgtactactgcggtacctgggacggcggccgcggcacgggtgtttttggccagggtacgaaggttgaaatcaaa

SEQ ID NO: 729 - DNA, 747 bp, synthetic construct
  source 1..747: mol_type = other DNA
caggtgcagttagttgaaagcggcggtggtgtggtgcaaccgggtcgtagcttacgtttatcttgcgcggcctctggctttacctttagcagctatgcgatgcattgggtgcgtcaggcgccaggtaagggcttagagtgggtggcggttatctcttatgacggtagcaacaagtactacgccgatagcgttaaaggccgcttcacgattagccgcgacaacagcaaaaataccttatacttacagatgaattctttacgcgccgaggatacggccgtttattattgtgccaaagacggtggtggtgtttacacgctggattactggggtcagtggggtcagggcaccttagttacggtgagcagcggcggttcttctcgctctagctcttctggcggcggcggtagcggcggtggcggcgaaatcgtgctgacgcagagcccggcgaccctgagcctgtctccaggcgagcgcgcgaccctgtcttgccgcgcctctcagtctgtttctagctcttatttagcgtggtaccagcagaagccaggccaagcgccacgcctgctgatttacggcgcctcttctcgtgccacgggtatcccggcgcgtttcagcggcagcggtagcggcaccgacttcaccctgaccatctctcgtctggagccagaggatttcgccgtgtactattgtcaggcgtgggacagctcttctaaggtggtgtttggtcaaggtacgaaagttgaaattaaa

SEQ ID NO: 730 - DNA, 753 bp, synthetic construct
  source 1..753: mol_type = other DNA
caggtgcagttagttgaaagcggcggtggtgtggtgcaaccgggtcgtagcttacgtttatcttgcgcggcctctggctttacctttagcagctatgcgatgcattgggtgcgtcaggcgccaggtaagggcttagagtgggtggcggttatctcttatgacggtagcaacaagtactacgccgatagcgttaaaggccgcttcacgattagccgcgacaacagcaaaaataccttatacttacagatgaattctttacgcgccgaggatacggccgtttattattgtgccaaagacggtggtggtgtttacacgctggattactggggtcagtggggtcagggcaccttagttacggtgagcagcggcggttcttctcgctctagctcttctggcggcggcggtagcggcggtggcggcgaaatcgtgctgacgcagagcccggcgaccctgagcctgtctccaggcgagcgcgcgaccctgtcttgccgcgcctctcagtctgtttctagctcttatttagcgtggtaccagcagaagccaggccaagcgccacgcctgctgatttacggcgcctcttctcgtgccacgggtatcccggcgcgtttcagcggcagcggtagcggcaccgacttcaccctgaccatctctcgtctggagccagaggatttcgccgtgtactattgtcaggcgtgggacagctctacgacgccgttttgggtgttcggtcaaggtaccaaggtggaaattaaa

SEQ ID NO: 731 - DNA, 744 bp, synthetic construct
  source 1..744: mol_type = other DNA
caggtgcagttagttgaaagcggcggtggtgtggtgcaaccgggtcgtagcttacgtttatcttgcgcggcctctggctttacctttagcagctatgcgatgcattgggtgcgtcaggcgccaggtaagggcttagagtgggtggcggttatctcttatgacggtagcaacaagtactacgccgatagcgttaaaggccgcttcacgattagccgcgacaacagcaaaaataccttatacttacagatgaattctttacgcgccgaggatacggccgtttattattgtgccaaagacggtggtggtgtttacacgctggattactggggtcagtggggtcagggcaccttagttacggtgagcagcggcggttcttctcgctctagctcttctggcggcggcggtagcggcggtggcggcgaaatcgtgctgacgcagagcccggcgaccctgagcctgtctccaggcgagcgcgcgaccctgtcttgccgcgcctctcagtctgtttctagctcttatttagcgtggtaccagcagaagccaggccaagcgccacgcctgctgatttacggcgcctcttctcgtgccacgggtatcccggcgcgtttcagcggcagcggtagcggcaccgacttcaccctgaccatctctcgtctggagccagaggatttcgccgtgtactattgtcagacctgggacagcttcggtcaagtgtttggccaaggtacgaaggtggagattaaa

SEQ ID NO: 732 - DNA, 771 bp, synthetic construct
  source 1..771: mol_type = other DNA
caggtgcagttagttgaaagcggcggtggtgtggtgcaaccgggtcgtagcttacgtttatcttgcgcggcctctggctttacctttagcagctatgcgatgcattgggtgcgtcaggcgccaggtaagggcttagagtgggtggcggttatctcttatgacggtagcaacaagtactacgccgatagcgttaaaggccgcttcacgattagccgcgacaacagcaaaaataccttatacttacagatgaattctttacgcgccgaggatacggccgtttattattgtgccaaagacggtcactggtaccgcggttactatggctcttactatttagattattggggccaatggggtcaaggcaccctggtgacggtttcttctggtggctcttctcgtagcagctctagcggcggtggcggcagcggtggcggcggtgaaattgtgctgacccagagcccggccacgctgtctttaagcccgggcgagcgtgccacgttaagctgtcgcgccagccaaagcgttagctctagctatttagcctggtatcaacagaagccaggccaggcgccacgtttattaatctatggtgcctcttctcgtgcgaccggtattccggcgcgctttagcggctctggtagcggcaccgacttcaccctgacgatctctcgtttagagccggaggatttcgcggtgtactattgtgccgcccgtgatgattctttaaacggtccgtgggtttttggccagggtacgaaggtggagatcaaa

SEQ ID NO: 733 - DNA, 765 bp, synthetic construct
  source 1..765: mol_type = other DNA
caggtgcagttagttgaaagcggcggtggtgtggtgcaaccgggtcgtagcttacgtttatcttgcgcggcctctggctttacctttagcagctatgcgatgcattgggtgcgtcaggcgccaggtaagggcttagagtgggtggcggttatctcttatgacggtagcaacaagtactacgccgatagcgttaaaggccgcttcacgattagccgcgacaacagcaaaaataccttatacttacagatgaattctttacgcgccgaggatacggccgtttattattgtgccaaagacggtcactggtaccgcggttactatggctcttactatttagattattggggccaatggggtcaaggcaccctggtgacggtttcttctggtggctcttctcgtagcagctctagcggcggtggcggcagcggtggcggcggtgaaattgtgctgacccagagcccggccacgctgtctttaagcccgggcgagcgtgccacgttaagctgtcgcgccagccaaagcgttagctctagctatttagcctggtatcaacagaagccaggccaggcgccacgtttattaatctatggtgcctcttctcgtgcgaccggtattccggcgcgctttagcggctctggtagcggcaccgacttcaccctgacgatctctcgtttagagccggaggatttcgcggtgtactattgtcaacaatattatagcccaccaccatacaccttcggccagggcacgaaggttgaaatcaaa

SEQ ID NO: 734 - DNA, 768 bp, synthetic construct
  source 1..768: mol_type = other DNA
caggtgcagttagttgaaagcggcggtggtgtggtgcaaccgggtcgtagcttacgtttatcttgcgcggcctctggctttacctttagcagctatgcgatgcattgggtgcgtcaggcgccaggtaagggcttagagtgggtggcggttatctcttatgacggtagcaacaagtactacgccgatagcgttaaaggccgcttcacgattagccgcgacaacagcaaaaataccttatacttacagatgaattctttacgcgccgaggatacggccgtttattattgtgccaaagacggtcactggtaccgcggttactatggctcttactatttagattattggggccaatggggtcaaggcaccctggtgacggtttcttctggtggctcttctcgtagcagctctagcggcggtggcggcagcggtggcggcggtgaaattgtgctgacccagagcccggccacgctgtctttaagcccgggcgagcgtgccacgttaagctgtcgcgccagccaaagcgttagctctagctatttagcctggtatcaacagaagccaggccaggcgccacgtttattaatctatggtgcctcttctcgtgcgaccggtattccggcgcgctttagcggctctggtagcggcaccgacttcaccctgacgatctctcgtttagagccggaggatttcgcggtgtactattgtcaatcttatgatagctctttatctggtagcgtttttggccagggtacgaaggtggagatcaaa

SEQ ID NO: 735 - DNA, 747 bp, synthetic construct
  source 1..747: mol_type = other DNA
caggtgcagttagttgaaagcggcggtggtgtggtgcaaccgggtcgtagcttacgtttatcttgcgcggcctctggctttacctttagcagctatgcgatgcattgggtgcgtcaggcgccaggtaagggcttagagtgggtggcggttatctcttatgacggtagcaacaagtactacgccgatagcgttaaaggccgcttcacgattagccgcgacaacagcaaaaataccttatacttacagatgaattctttacgcgccgaggatacggccgtttattattgtgccaaagaccacacgatgttaggttctttcgattattggggtcaatggggccaaggcaccctggttacggttagcagcggcggctcttctcgctcttctagctctggtggcggcggctctggcggcggtggcgaaattgttctgacccaaagcccggcgaccctgagcctgagcccaggtgaacgcgccaccctgagctgtcgtgcctctcaaagcgtttcttctagctacctggcctggtatcaacagaaaccaggtcaggccccgcgcttactgatttatggtgcgtcttctcgcgcgacgggtatcccagcgcgtttttctggcagcggctctggcaccgatttcacgctgaccatttctcgcctggaaccagaggactttgccgtttattactgccaacagagctacagcccaacgttatggacctttggccaaggtacgaaggtggagattaaa

SEQ ID NO: 736 - DNA, 756 bp, synthetic construct
  source 1..756: mol_type = other DNA
caggtgcagttagttgaaagcggcggtggtgtggtgcaaccgggtcgtagcttacgtttatcttgcgcggcctctggctttacctttagcagctatgcgatgcattgggtgcgtcaggcgccaggtaagggcttagagtgggtggcggttatctcttatgacggtagcaacaagtactacgccgatagcgttaaaggccgcttcacgattagccgcgacaacagcaaaaataccttatacttacagatgaattctttacgcgccgaggatacggccgtttattattgtgccaaagacatctcttcttggtacaagtctggcgcgttcggttattggggtcagtggggccagggtacgttagtgaccgtgagctctggtggttcttctcgttcttctagcagcggcggtggcggctctggcggcggcggtgaaattgttctgacccagagcccggcgaccctgtctttaagcccaggtgaacgtgcgacgctgtcttgtcgcgcgtctcaatctgtgtctagctcttatttagcgtggtatcaacaaaaaccaggccaagccccgcgtctgttaatttacggtgccagctctcgcgccacgggcattccggcccgttttagcggtagcggcagcggtacggattttaccttaacgattagccgcttagagccggaggactttgccgtgtactattgccacgcgtgggactctttcaccgcgagcgttttcggtcaaggcacgaaagtggaaatcaaa

SEQ ID NO: 737 - DNA, 759 bp, synthetic construct
  source 1..759: mol_type = other DNA
caggtgcagttagttgaaagcggcggtggtgtggtgcaaccgggtcgtagcttacgtttatcttgcgcggcctctggctttacctttagcagctatgcgatgcattgggtgcgtcaggcgccaggtaagggcttagagtgggtggcggttatctcttatgacggtagcaacaagtactacgccgatagcgttaaaggccgcttcacgattagccgcgacaacagcaaaaataccttatacttacagatgaattctttacgcgccgaggatacggccgtttattattgtgccaaagacttaggtacgggtttcatgcaaggctattgggccttagattactggggccagtggggccaaggtacgctggtgaccgtgtcttctggtggttctagccgctctagcagcagcggtggcggcggtagcggcggcggtggcgaaatcgtgctgacccagagcccggcgaccttatctctgtctccaggcgaacgtgccaccttatcttgtcgtgcctctcaaagcgttagctctagctacctggcgtggtaccaacagaagccgggtcaagcgccgcgtttactgatctacggtgcgtcttctcgcgccaccggcattccagcgcgtttttctggcagcggctctggtaccgattttacgttaaccatttctcgcttagaaccagaggatttcgcggtttattattgtcagcaacgctctaattggccgctgacgttcggtcaaggcacgaaagtggaaatcaaa

SEQ ID NO: 738 - DNA, 744 bp, synthetic construct
  source 1..744: mol_type = other DNA
caggtgcagttagttgaaagcggcggtggtgtggtgcaaccgggtcgtagcttacgtttatcttgcgcggcctctggctttacctttagcagctatgcgatgcattgggtgcgtcaggcgccaggtaagggcttagagtgggtggcggttatctcttatgacggtagcaacaagtactacgccgatagcgttaaaggccgcttcacgattagccgcgacaacagcaaaaataccttatacttacagatgaattctttacgcgccgaggatacggccgtttattattgtgccaaagacttacgcttctctggtgtttttgattactggggtcagtggggtcagggcaccttagttacggtgagcagcggcggttcttctcgctctagctcttctggcggcggcggtagcggcggtggcggcgaaatcgtgctgacgcagagcccggcgaccctgagcctgtctccaggcgagcgcgcgaccctgtcttgccgcgcctctcagtctgtttctagctcttatttagcgtggtaccagcagaagccaggccaagcgccacgcctgctgatttacggcgcctcttctcgtgccacgggtatcccggcgcgtttcagcggcagcggtagcggcaccgacttcaccctgaccatctctcgtctggagccagaggatttcgccgtgtactattgtcagcagtcttattctacgccacgtacctttggtcaaggtacgaaagttgaaattaaa

SEQ ID NO: 739 - DNA, 750 bp, synthetic construct
  source 1..750: mol_type = other DNA
caggtgcagttagttgaaagcggcggtggtgtggtgcaaccgggtcgtagcttacgtttatcttgcgcggcctctggctttacctttagcagctatgcgatgcattgggtgcgtcaggcgccaggtaagggcttagagtgggtggcggttatctcttatgacggtagcaacaagtactacgccgatagcgttaaaggccgcttcacgattagccgcgacaacagcaaaaataccttatacttacagatgaattctttacgcgccgaggatacggccgtttattattgtgccaaagacttacgcttctctggtgtttttgattactggggtcagtggggtcagggcaccttagttacggtgagcagcggcggttcttctcgctctagctcttctggcggcggcggtagcggcggtggcggcgaaatcgtgctgacgcagagcccggcgaccctgagcctgtctccaggcgagcgcgcgaccctgtcttgccgcgcctctcagtctgtttctagctcttatttagcgtggtaccagcagaagccaggccaagcgccacgcctgctgatttacggcgcctcttctcgtgccacgggtatcccggcgcgtttcagcggcagcggtagcggcaccgacttcaccctgaccatctctcgtctggagccagaggatttcgccgtgtactattgtcaggtgtgggacagctcttctttacatcgtgtgttcggtcaaggtaccaaggtggaaattaaa

SEQ ID NO: 740 - DNA, 750 bp, synthetic construct
  source 1..750: mol_type = other DNA
caggtgcagttagttgaaagcggcggtggtgtggtgcaaccgggtcgtagcttacgtttatcttgcgcggcctctggctttacctttagcagctatgcgatgcattgggtgcgtcaggcgccaggtaagggcttagagtgggtggcggttatctcttatgacggtagcaacaagtactacgccgatagcgttaaaggccgcttcacgattagccgcgacaacagcaaaaataccttatacttacagatgaattctttacgcgccgaggatacggccgtttattattgtgccaaagacttacgcttagttcgcgttctggattactggggtcagtggggtcagggcaccttagttacggtgagcagcggcggttcttctcgctctagctcttctggcggcggcggtagcggcggtggcggcgaaatcgtgctgacgcagagcccggcgaccctgagcctgtctccaggcgagcgcgcgaccctgtcttgccgcgcctctcagtctgtttctagctcttatttagcgtggtaccagcagaagccaggccaagcgccacgcctgctgatttacggcgcctcttctcgtgccacgggtatcccggcgcgtttcagcggcagcggtagcggcaccgacttcaccctgaccatctctcgtctggagccagaggatttcgccgtgtactattgtgaaacctggacgaatacgtacacgcgttatgtgttcggtcaaggtaccaaggtggaaattaaa

SEQ ID NO: 741 - DNA, 750 bp, synthetic construct
  source 1..750: mol_type = other DNA
caggtgcagttagttgaaagcggcggtggtgtggtgcaaccgggtcgtagcttacgtttatcttgcgcggcctctggctttacctttagcagctatgcgatgcattgggtgcgtcaggcgccaggtaagggcttagagtgggtggcggttatctcttatgacggtagcaacaagtactacgccgatagcgttaaaggccgcttcacgattagccgcgacaacagcaaaaataccttatacttacagatgaattctttacgcgccgaggatacggccgtttattattgtgccaaagacttaacgttcgcccgcgccctggattactggggtcagtggggtcagggcaccttagttacggtgagcagcggcggttcttctcgctctagctcttctggcggcggcggtagcggcggtggcggcgaaatcgtgctgacgcagagcccggcgaccctgagcctgtctccaggcgagcgcgcgaccctgtcttgccgcgcctctcagtctgtttctagctcttatttagcgtggtaccagcagaagccaggccaagcgccacgcctgctgatttacggcgcctcttctcgtgccacgggtatcccggcgcgtttcagcggcagcggtagcggcaccgacttcaccctgaccatctctcgtctggagccagaggatttcgccgtgtactattgtgcggcgtgggacgattctttaaacccgtatgtgttcggtcaaggtaccaaggtggaaattaaa

SEQ ID NO: 742 - DNA, 756 bp, synthetic construct
  source 1..756: mol_type = other DNA
caggtgcagttagttgaaagcggcggtggtgtggtgcaaccgggtcgtagcttacgtttatcttgcgcggcctctggctttacctttagcagctatgcgatgcattgggtgcgtcaggcgccaggtaagggcttagagtgggtggcggttatctcttatgacggtagcaacaagtactacgccgatagcgttaaaggccgcttcacgattagccgcgacaacagcaaaaataccttatacttacagatgaattctttacgcgccgaggatacggccgtttattattgtgccaaagacttaacgttcgcccgcgccctggattactggggtcagtggggtcagggcaccttagttacggtgagcagcggcggttcttctcgctctagctcttctggcggcggcggtagcggcggtggcggcgaaatcgtgctgacgcagagcccggcgaccctgagcctgtctccaggcgagcgcgcgaccctgtcttgccgcgcctctcagtctgtttctagctcttatttagcgtggtaccagcagaagccaggccaagcgccacgcctgctgatttacggcgcctcttctcgtgccacgggtatcccggcgcgtttcagcggcagcggtagcggcaccgacttcaccctgaccatctctcgtctggagccagaggatttcgccgtgtactattgtggcacctgggacagctctttattaagcctgctggttgttttcggtcagggtaccaaagtggagatcaaa

SEQ ID NO: 743 - DNA, 744 bp, synthetic construct
  source 1..744: mol_type = other DNA
caggtgcagttagttgaaagcggcggtggtgtggtgcaaccgggtcgtagcttacgtttatcttgcgcggcctctggctttacctttagcagctatgcgatgcattgggtgcgtcaggcgccaggtaagggcttagagtgggtggcggttatctcttatgacggtagcaacaagtactacgccgatagcgttaaaggccgcttcacgattagccgcgacaacagcaaaaataccttatacttacagatgaattctttacgcgccgaggatacggccgtttattattgtgccaaagacttaacgttcgcccgcgccctggattactggggtcagtggggtcagggcaccttagttacggtgagcagcggcggttcttctcgctctagctcttctggcggcggcggtagcggcggtggcggcgaaatcgtgctgacgcagagcccggcgaccctgagcctgtctccaggcgagcgcgcgaccctgtcttgccgcgcctctcagtctgtttctagctcttatttagcgtggtaccagcagaagccaggccaagcgccacgcctgctgatttacggcgcctcttctcgtgccacgggtatcccggcgcgtttcagcggcagcggtagcggcaccgacttcaccctgaccatctctcgtctggagccagaggatttcgccgtgtactattgtcaggcgtgggacagcaagacggttgtgtttggccaaggtacgaaggtggagattaaa

SEQ ID NO: 744 - DNA, 747 bp, synthetic construct
  source 1..747: mol_type = other DNA
caggtgcagttagttgaaagcggcggtggtgtggtgcaaccgggtcgtagcttacgtttatcttgcgcggcctctggctttacctttagcagctatgcgatgcattgggtgcgtcaggcgccaggtaagggcttagagtgggtggcggttatctcttatgacggtagcaacaagtactacgccgatagcgttaaaggccgcttcacgattagccgcgacaacagcaaaaataccttatacttacagatgaattctttacgcgccgaggatacggccgtttattattgtgccaaagacttaacgttcgcccgcgccctggattactggggtcagtggggtcagggcaccttagttacggtgagcagcggcggttcttctcgctctagctcttctggcggcggcggtagcggcggtggcggcgaaatcgtgctgacgcagagcccggcgaccctgagcctgtctccaggcgagcgcgcgaccctgtcttgccgcgcctctcagtctgtttctagctcttatttagcgtggtaccagcagaagccaggccaagcgccacgcctgctgatttacggcgcctcttctcgtgccacgggtatcccggcgcgtttcagcggcagcggtagcggcaccgacttcaccctgaccatctctcgtctggagccagaggatttcgccgtgtactattgtcagcagtactattctccaccaccgtataccttcggtcaaggtaccaaggtggaaattaaa

SEQ ID NO: 745 - DNA, 750 bp, synthetic construct
  source 1..750: mol_type = other DNA
caggtgcagttagttgaaagcggcggtggtgtggtgcaaccgggtcgtagcttacgtttatcttgcgcggcctctggctttacctttagcagctatgcgatgcattgggtgcgtcaggcgccaggtaagggcttagagtgggtggcggttatctcttatgacggtagcaacaagtactacgccgatagcgttaaaggccgcttcacgattagccgcgacaacagcaaaaataccttatacttacagatgaattctttacgcgccgaggatacggccgtttattattgtgccaaagacttaacgttcgcccgcgccctggattactggggtcagtggggtcagggcaccttagttacggtgagcagcggcggttcttctcgctctagctcttctggcggcggcggtagcggcggtggcggcgaaatcgtgctgacgcagagcccggcgaccctgagcctgtctccaggcgagcgcgcgaccctgtcttgccgcgcctctcagtctgtttctagctcttatttagcgtggtaccagcagaagccaggccaagcgccacgcctgctgatttacggcgcctcttctcgtgccacgggtatcccggcgcgtttcagcggcagcggtagcggcaccgacttcaccctgaccatctctcgtctggagccagaggatttcgccgtgtactattgtcagagcgccgattcttctgccggctttgtggttttcggtcaaggcacgaaagtggaaatcaaa

SEQ ID NO: 746 - DNA, 747 bp, synthetic construct
  source 1..747: mol_type = other DNA
caggtgcagttagttgaaagcggcggtggtgtggtgcaaccgggtcgtagcttacgtttatcttgcgcggcctctggctttacctttagcagctatgcgatgcattgggtgcgtcaggcgccaggtaagggcttagagtgggtggcggttatctcttatgacggtagcaacaagtactacgccgatagcgttaaaggccgcttcacgattagccgcgacaacagcaaaaataccttatacttacagatgaattctttacgcgccgaggatacggccgtttattattgtgccaaagacttaacgggtacgtggacgttagatctgtggggtcaatggggccaaggcaccctggttacggttagcagcggcggctcttctcgctcttctagctctggtggcggcggctctggcggcggtggcgaaattgttctgacccaaagcccggcgaccctgagcctgagcccaggtgaacgcgccaccctgagctgtcgtgcctctcaaagcgtttcttctagctacctggcctggtatcaacagaaaccaggtcaggccccgcgcttactgatttatggtgcgtcttctcgcgcgacgggtatcccagcgcgtttttctggcagcggctctggcaccgatttcacgctgaccatttctcgcctggaaccagaggactttgccgtttattactgccaacagcgttctaattggccaccatacacctttggccaaggtacgaaggtggagattaaa

SEQ ID NO: 747 - DNA, 744 bp, synthetic construct
  source 1..744: mol_type = other DNA
caggtgcagttagttgaaagcggcggtggtgtggtgcaaccgggtcgtagcttacgtttatcttgcgcggcctctggctttacctttagcagctatgcgatgcattgggtgcgtcaggcgccaggtaagggcttagagtgggtggcggttatctcttatgacggtagcaacaagtactacgccgatagcgttaaaggccgcttcacgattagccgcgacaacagcaaaaataccttatacttacagatgaattctttacgcgccgaggatacggccgtttattattgtgccaaagacccatctcaaaagtactactttgattactggggtcagtggggtcagggcaccttagttacggtgagcagcggcggttcttctcgctctagctcttctggcggcggcggtagcggcggtggcggcgaaatcgtgctgacgcagagcccggcgaccctgagcctgtctccaggcgagcgcgcgaccctgtcttgccgcgcctctcagtctgtttctagctcttatttagcgtggtaccagcagaagccaggccaagcgccacgcctgctgatttacggcgcctcttctcgtgccacgggtatcccggcgcgtttcagcggcagcggtagcggcaccgacttcaccctgaccatctctcgtctggagccagaggatttcgccgtgtactattgtcagcagtactataactggccacaaacctttggccaaggtacgaaggtggagattaaa

SEQ ID NO: 748 - DNA, 771 bp, synthetic construct
  source 1..771: mol_type = other DNA
caggtgcagttagttgaaagcggcggtggtgtggtgcaaccgggtcgtagcttacgtttatcttgcgcggcctctggctttacctttagcagctatgcgatgcattgggtgcgtcaggcgccaggtaagggcttagagtgggtggcggttatctcttatgacggtagcaacaagtactacgccgatagcgttaaaggccgcttcacgattagccgcgacaacagcaaaaataccttatacttacagatgaattctttacgcgccgaggatacggccgtttattattgtgccaaagaccgcccaggtccagcctgtaatcgttaccacaattacggctgcaatgtttggggtcaatggggccagggcaccttagttacggtttctagcggtggtagcagccgttctagcagctctggcggcggcggtagcggcggtggcggcgaaattgtgctgacccagtctccagcgacgttaagcctgagcccaggcgagcgcgccaccttatcttgtcgtgccagccaaagcgttagcagctcttacctggcctggtatcaacaaaaaccgggccaagcgccacgcttactgatctacggtgccagcagccgtgccaccggcattccagcgcgtttttctggtagcggcagcggtacggattttacgttaacgatttctcgcctggagccggaggattttgccgtgtactactgtcaggtgtggaattcttcttctgaccattgggtttttggccagggtacgaaggtggagatcaaa

SEQ ID NO: 749 - DNA, 750 bp, synthetic construct
  source 1..750: mol_type = other DNA
caggtgcagttagttgaaagcggcggtggtgtggtgcaaccgggtcgtagcttacgtttatcttgcgcggcctctggctttacctttagcagctatgcgatgcattgggtgcgtcaggcgccaggtaagggcttagagtgggtggcggttatctcttatgacggtagcaacaagtactacgccgatagcgttaaaggccgcttcacgattagccgcgacaacagcaaaaataccttatacttacagatgaattctttacgcgccgaggatacggccgtttattattgtgccaaagaccgccgcggtgccggttactattatttcgaccattggggtcagtggggccagggtacgttagtgaccgtgagctctggtggttcttctcgttcttctagcagcggcggtggcggctctggcggcggcggtgaaattgttctgacccagagcccggcgaccctgtctttaagcccaggtgaacgtgcgacgctgtcttgtcgcgcgtctcaatctgtgtctagctcttatttagcgtggtatcaacaaaaaccaggccaagccccgcgtctgttaatttacggtgccagctctcgcgccacgggcattccggcccgttttagcggtagcggcagcggtacggattttaccttaacgattagccgcttagagccggaggactttgccgtgtactattgccaacagtactactctaccccgctgacgttcggtcaaggcacgaaagtggaaatcaaa

SEQ ID NO: 750 - DNA, 750 bp, synthetic construct
  source 1..750: mol_type = other DNA
caggtgcagttagttgaaagcggcggtggtgtggtgcaaccgggtcgtagcttacgtttatcttgcgcggcctctggctttacctttagcagctatgcgatgcattgggtgcgtcaggcgccaggtaagggcttagagtgggtggcggttatctcttatgacggtagcaacaagtactacgccgatagcgttaaaggccgcttcacgattagccgcgacaacagcaaaaataccttatacttacagatgaattctttacgcgccgaggatacggccgtttattattgtgccaaagaccgccgcaactggccacgcggttattttgactactggggccaatggggccagggcacgttagttaccgtgagcagcggtggttcttctcgcagctcttctagcggcggcggtggcagcggtggcggcggcgagattgtgttaacccagagcccggcgaccctgagcttatctccgggtgagcgtgcgaccttaagctgtcgcgccagccaatctgttagctctagctacctggcctggtatcagcaaaagccgggtcaggccccacgtctgctgatctatggtgcctctagccgcgccacgggtattccggcgcgctttagcggctctggcagcggcacggactttaccctgacgatcagccgtttagagccagaagacttcgcggtttattactgccaggcctgggattcttctacggtggtgtttggtcaaggtacgaaagttgaaattaaa

SEQ ID NO: 751 - DNA, 753 bp, synthetic construct
  source 1..753: mol_type = other DNA
caggtgcagttagttgaaagcggcggtggtgtggtgcaaccgggtcgtagcttacgtttatcttgcgcggcctctggctttacctttagcagctatgcgatgcattgggtgcgtcaggcgccaggtaagggcttagagtgggtggcggttatctcttatgacggtagcaacaagtactacgccgatagcgttaaaggccgcttcacgattagccgcgacaacagcaaaaataccttatacttacagatgaattctttacgcgccgaggatacggccgtttattattgtgccaaagaccgccgcaactggccacgcggttattttgactactggggccaatggggccagggcacgttagttaccgtgagcagcggtggttcttctcgcagctcttctagcggcggcggtggcagcggtggcggcggcgagattgtgttaacccagagcccggcgaccctgagcttatctccgggtgagcgtgcgaccttaagctgtcgcgccagccaatctgttagctctagctacctggcctggtatcagcaaaagccgggtcaggccccacgtctgctgatctatggtgcctctagccgcgccacgggtattccggcgcgctttagcggctctggcagcggcacggactttaccctgacgatcagccgtttagagccagaagacttcgcggtttattactgccagtcttatacgggtggtagcagctatgttttcggtcaaggcacgaaagtggaaatcaaa

SEQ ID NO: 752 - DNA, 762 bp, synthetic construct
  source 1..762: mol_type = other DNA
caggtgcagttagttgaaagcggcggtggtgtggtgcaaccgggtcgtagcttacgtttatcttgcgcggcctctggctttacctttagcagctatgcgatgcattgggtgcgtcaggcgccaggtaagggcttagagtgggtggcggttatctcttatgacggtagcaacaagtactacgccgatagcgttaaaggccgcttcacgattagccgcgacaacagcaaaaataccttatacttacagatgaattctttacgcgccgaggatacggccgtttattattgtgccaaagactggggttggtaccgcggttacggtcatgcgggtgccgtggacatttggggccagtggggtcaaggtaccctggtgaccgtttcttctggtggtagctctcgcagcagcagctctggcggcggtggcagcggcggtggcggcgagattgtgctgacccagagcccggcgacgttaagcttatctccgggcgaacgcgcgacgttatcttgccgcgcctctcagtctgtgtctagctcttatctggcctggtaccagcaaaaaccaggtcaggcgccgcgcctgttaatctacggcgcctcttctcgcgcgaccggcatcccggcgcgtttcagcggcagcggttctggcaccgatttcacgctgaccatctctcgcctggagccagaagactttgccgtgtattactgcgagacgtgggacagcgatacctacgttttcggtcagggtaccaaagtggagatcaaa

SEQ ID NO: 753 - DNA, 768 bp, synthetic construct
  source 1..768: mol_type = other DNA
caggtgcagttagttgaaagcggcggtggtgtggtgcaaccgggtcgtagcttacgtttatcttgcgcggcctctggctttacctttagcagctatgcgatgcattgggtgcgtcaggcgccaggtaagggcttagagtgggtggcggttatctcttatgacggtagcaacaagtactacgccgatagcgttaaaggccgcttcacgattagccgcgacaacagcaaaaataccttatacttacagatgaattctttacgcgccgaggatacggccgtttattattgtgccaaagactggggttggtaccgcggttacggtcatgcgggtgccgtggacatttggggccagtggggtcaaggtaccctggtgaccgtttcttctggtggtagctctcgcagcagcagctctggcggcggtggcagcggcggtggcggcgagattgtgctgacccagagcccggcgacgttaagcttatctccgggcgaacgcgcgacgttatcttgccgcgcctctcagtctgtgtctagctcttatctggcctggtaccagcaaaaaccaggtcaggcgccgcgcctgttaatctacggcgcctcttctcgcgcgaccggcatcccggcgcgtttcagcggcagcggttctggcaccgatttcacgctgaccatctctcgcctggagccagaagactttgccgtgtattactgcggtgcctgggacaatagccgtcacccagaggtttttggtcagggcaccaaggttgagattaaa

SEQ ID NO: 754 - DNA, 765 bp, synthetic construct
  source 1..765: mol_type = other DNA
caggtgcagttagttgaaagcggcggtggtgtggtgcaaccgggtcgtagcttacgtttatcttgcgcggcctctggctttacctttagcagctatgcgatgcattgggtgcgtcaggcgccaggtaagggcttagagtgggtggcggttatctcttatgacggtagcaacaagtactacgccgatagcgttaaaggccgcttcacgattagccgcgacaacagcaaaaataccttatacttacagatgaattctttacgcgccgaggatacggccgtttattattgtgccaaagactggggttggtaccgcggttacggtcatgcgggtgccgtggacatttggggccagtggggtcaaggtaccctggtgaccgtttcttctggtggtagctctcgcagcagcagctctggcggcggtggcagcggcggtggcggcgagattgtgctgacccagagcccggcgacgttaagcttatctccgggcgaacgcgcgacgttatcttgccgcgcctctcagtctgtgtctagctcttatctggcctggtaccagcaaaaaccaggtcaggcgccgcgcctgttaatctacggcgcctcttctcgcgcgaccggcatcccggcgcgtttcagcggcagcggttctggcaccgatttcacgctgaccatctctcgcctggagccagaagactttgccgtgtattactgccaagcctgggacagcagcagcacgttcgttttcggccaaggcaccaaagttgagatcaaa

SEQ ID NO: 755 - DNA, 762 bp, synthetic construct
  source 1..762: mol_type = other DNA
caggtgcagttagttgaaagcggcggtggtgtggtgcaaccgggtcgtagcttacgtttatcttgcgcggcctctggctttacctttagcagctatgcgatgcattgggtgcgtcaggcgccaggtaagggcttagagtgggtggcggttatctcttatgacggtagcaacaagtactacgccgatagcgttaaaggccgcttcacgattagccgcgacaacagcaaaaataccttatacttacagatgaattctttacgcgccgaggatacggccgtttattattgtgccaaagactggggttggtaccgcggttacggtcatgcgggtgccgtggacatttggggccagtggggtcaaggtaccctggtgaccgtttcttctggtggtagctctcgcagcagcagctctggcggcggtggcagcggcggtggcggcgagattgtgctgacccagagcccggcgacgttaagcttatctccgggcgaacgcgcgacgttatcttgccgcgcctctcagtctgtgtctagctcttatctggcctggtaccagcaaaaaccaggtcaggcgccgcgcctgttaatctacggcgcctcttctcgcgcgaccggcatcccggcgcgtttcagcggcagcggttctggcaccgatttcacgctgaccatctctcgcctggagccagaagactttgccgtgtattactgccaacaatctgatagcccgccaatcacgttcggccaaggcaccaaagttgagatcaaa

SEQ ID NO: 756 - DNA, 762 bp, synthetic construct
  source 1..762: mol_type = other DNA
caggtgcagttagttgaaagcggcggtggtgtggtgcaaccgggtcgtagcttacgtttatcttgcgcggcctctggctttacctttagcagctatgcgatgcattgggtgcgtcaggcgccaggtaagggcttagagtgggtggcggttatctcttatgacggtagcaacaagtactacgccgatagcgttaaaggccgcttcacgattagccgcgacaacagcaaaaataccttatacttacagatgaattctttacgcgccgaggatacggccgtttattattgtgccaaagactggggttggtaccgcggttacggtcatgcgggtgccgtggacatttggggccagtggggtcaaggtaccctggtgaccgtttcttctggtggtagctctcgcagcagcagctctggcggcggtggcagcggcggtggcggcgagattgtgctgacccagagcccggcgacgttaagcttatctccgggcgaacgcgcgacgttatcttgccgcgcctctcagtctgtgtctagctcttatctggcctggtaccagcaaaaaccaggtcaggcgccgcgcctgttaatctacggcgcctcttctcgcgcgaccggcatcccggcgcgtttcagcggcagcggttctggcaccgatttcacgctgaccatctctcgcctggagccagaagactttgccgtgtattactgccaacaatcttatagcccgccaatcacgttcggccaaggcaccaaagttgagatcaaa

SEQ ID NO: 757 - DNA, 768 bp, synthetic construct
  source 1..768: mol_type = other DNA
caggtgcagttagttgaaagcggcggtggtgtggtgcaaccgggtcgtagcttacgtttatcttgcgcggcctctggctttacctttagcagctatgcgatgcattgggtgcgtcaggcgccaggtaagggcttagagtgggtggcggttatctcttatgacggtagcaacaagtactacgccgatagcgttaaaggccgcttcacgattagccgcgacaacagcaaaaataccttatacttacagatgaattctttacgcgccgaggatacggccgtttattattgtgccaaagactggggttggtaccgcggttacggtcatgcgggtgccgtggacatttggggccagtggggtcaaggtaccctggtgaccgtttcttctggtggtagctctcgcagcagcagctctggcggcggtggcagcggcggtggcggcgagattgtgctgacccagagcccggcgacgttaagcttatctccgggcgaacgcgcgacgttatcttgccgcgcctctcagtctgtgtctagctcttatctggcctggtaccagcaaaaaccaggtcaggcgccgcgcctgttaatctacggcgcctcttctcgcgcgaccggcatcccggcgcgtttcagcggcagcggttctggcaccgatttcacgctgaccatctctcgcctggagccagaagactttgccgtgtattactgccaatcttacgatacccatttatctggtccaattttcggccagggcacgaaggttgaaatcaaa

SEQ ID NO: 758 - DNA, 768 bp, synthetic construct
  source 1..768: mol_type = other DNA
caggtgcagttagttgaaagcggcggtggtgtggtgcaaccgggtcgtagcttacgtttatcttgcgcggcctctggctttacctttagcagctatgcgatgcattgggtgcgtcaggcgccaggtaagggcttagagtgggtggcggttatctcttatgacggtagcaacaagtactacgccgatagcgttaaaggccgcttcacgattagccgcgacaacagcaaaaataccttatacttacagatgaattctttacgcgccgaggatacggccgtttattattgtgccaaagactggggttggtaccgcggttacggtcatgcgggtgccgtggacatttggggccagtggggtcaaggtaccctggtgaccgtttcttctggtggtagctctcgcagcagcagctctggcggcggtggcagcggcggtggcggcgagattgtgctgacccagagcccggcgacgttaagcttatctccgggcgaacgcgcgacgttatcttgccgcgcctctcagtctgtgtctagctcttatctggcctggtaccagcaaaaaccaggtcaggcgccgcgcctgttaatctacggcgcctcttctcgcgcgaccggcatcccggcgcgtttcagcggcagcggttctggcaccgatttcacgctgaccatctctcgcctggagccagaagactttgccgtgtattactgcgttgcctgggacgatagcctgaacggttacgtttttggtcagggcaccaaggttgagattaaa

SEQ ID NO: 759 - DNA, 744 bp, synthetic construct
  source 1..744: mol_type = other DNA
caggtgcagttagttgaaagcggcggtggtgtggtgcaaccgggtcgtagcttacgtttatcttgcgcggcctctggctttacctttagcagctatgcgatgcattgggtgcgtcaggcgccaggtaagggcttagagtgggtggcggttatctcttatgacggtagcaacaagtactacgccgatagcgttaaaggccgcttcacgattagccgcgacaacagcaaaaataccttatacttacagatgaattctttacgcgccgaggatacggccgtttattattgtgccaaagagacgacgggtatcggtgcctttgattactggggtcagtggggtcagggcaccttagttacggtgagcagcggcggttcttctcgctctagctcttctggcggcggcggtagcggcggtggcggcgaaatcgtgctgacgcagagcccggcgaccctgagcctgtctccaggcgagcgcgcgaccctgtcttgccgcgcctctcagtctgtttctagctcttatttagcgtggtaccagcagaagccaggccaagcgccacgcctgctgatttacggcgcctcttctcgtgccacgggtatcccggcgcgtttcagcggcagcggtagcggcaccgacttcaccctgaccatctctcgtctggagccagaggatttcgccgtgtactattgtcagcagtcttattctccaccaccgacctttggtcaaggtacgaaagttgaaattaaa

SEQ ID NO: 760 - DNA, 753 bp, synthetic construct
  source 1..753: mol_type = other DNA
caggtgcagttagttgaaagcggcggtggtgtggtgcaaccgggtcgtagcttacgtttatcttgcgcggcctctggctttacctttagcagctatgcgatgcattgggtgcgtcaggcgccaggtaagggcttagagtgggtggcggttatctcttatgacggtagcaacaagtactacgccgatagcgttaaaggccgcttcacgattagccgcgacaacagcaaaaataccttatacttacagatgaattctttacgcgccgaggatacggccgtttattattgtgccaaagagacgacgggtatcggtgcctttgattactggggtcagtggggtcagggcaccttagttacggtgagcagcggcggttcttctcgctctagctcttctggcggcggcggtagcggcggtggcggcgaaatcgtgctgacgcagagcccggcgaccctgagcctgtctccaggcgagcgcgcgaccctgtcttgccgcgcctctcagtctgtttctagctcttatttagcgtggtaccagcagaagccaggccaagcgccacgcctgctgatttacggcgcctcttctcgtgccacgggtatcccggcgcgtttcagcggcagcggtagcggcaccgacttcaccctgaccatctctcgtctggagccagaggatttcgccgtgtactattgtagcagctacacctcttcttctaccccgtatgttgttttcggtcagggtaccaaagtggagatcaaa

SEQ ID NO: 761 - DNA, 747 bp, synthetic construct
  source 1..747: mol_type = other DNA
caggtgcagttagttgaaagcggcggtggtgtggtgcaaccgggtcgtagcttacgtttatcttgcgcggcctctggctttacctttagcagctatgcgatgcattgggtgcgtcaggcgccaggtaagggcttagagtgggtggcggttatctcttatgacggtagcaacaagtactacgccgatagcgttaaaggccgcttcacgattagccgcgacaacagcaaaaataccttatacttacagatgaattctttacgcgccgaggatacggccgtttattattgtgccaaaggtttcttatcttctgccttagattattggggtcaatggggccaaggcaccctggttacggttagcagcggcggctcttctcgctcttctagctctggtggcggcggctctggcggcggtggcgaaattgttctgacccaaagcccggcgaccctgagcctgagcccaggtgaacgcgccaccctgagctgtcgtgcctctcaaagcgtttcttctagctacctggcctggtatcaacagaaaccaggtcaggccccgcgcttactgatttatggtgcgtcttctcgcgcgacgggtatcccagcgcgtttttctggcagcggctctggcaccgatttcacgctgaccatttctcgcctggaaccagaggactttgccgtttattactgccaagtgtgggattctgtgaaggagcaagtggtgtttggtcaaggtacgaaagttgaaattaaa

SEQ ID NO: 762 - DNA, 753 bp, synthetic construct
  source 1..753: mol_type = other DNA
caggtgcagttagttgaaagcggcggtggtgtggtgcaaccgggtcgtagcttacgtttatcttgcgcggcctctggctttacctttagcagctatgcgatgcattgggtgcgtcaggcgccaggtaagggcttagagtgggtggcggttatctcttatgacggtagcaacaagtactacgccgatagcgttaaaggccgcttcacgattagccgcgacaacagcaaaaataccttatacttacagatgaattctttacgcgccgaggatacggccgtttattattgtgccaaaggtaaggactacttcacgacgggctatcaagactattggggtcagtggggccagggtacgttagtgaccgtgagctctggtggttcttctcgttcttctagcagcggcggtggcggctctggcggcggcggtgaaattgttctgacccagagcccggcgaccctgtctttaagcccaggtgaacgtgcgacgctgtcttgtcgcgcgtctcaatctgtgtctagctcttatttagcgtggtatcaacaaaaaccaggccaagccccgcgtctgttaatttacggtgccagctctcgcgccacgggcattccggcccgttttagcggtagcggcagcggtacggattttaccttaacgattagccgcttagagccggaggactttgccgtgtactattgccaacagtactactctgcgaccccgccaacgttcggtcagggtaccaaagtggagatcaaa

SEQ ID NO: 763 - DNA, 744 bp, synthetic construct
  source 1..744: mol_type = other DNA
caggtgcagttagttgaaagcggcggtggtgtggtgcaaccgggtcgtagcttacgtttatcttgcgcggcctctggctttacctttagcagctatgcgatgcattgggtgcgtcaggcgccaggtaagggcttagagtgggtggcggttatctcttatgacggtagcaacaagtactacgccgatagcgttaaaggccgcttcacgattagccgcgacaacagcaaaaataccttatacttacagatgaattctttacgcgccgaggatacggccgtttattattgtgccaaaggttctacgttaggtggttcttttgataactggggtcagtggggtcagggcaccttagttacggtgagcagcggcggttcttctcgctctagctcttctggcggcggcggtagcggcggtggcggcgaaatcgtgctgacgcagagcccggcgaccctgagcctgtctccaggcgagcgcgcgaccctgtcttgccgcgcctctcagtctgtttctagctcttatttagcgtggtaccagcagaagccaggccaagcgccacgcctgctgatttacggcgcctcttctcgtgccacgggtatcccggcgcgtttcagcggcagcggtagcggcaccgacttcaccctgaccatctctcgtctggagccagaggatttcgccgtgtactattgtcagcaggcctattctccaccaattacctttggtcaaggtacgaaagttgaaattaaa

SEQ ID NO: 764 - DNA, 738 bp, synthetic construct
  source 1..738: mol_type = other DNA
caggtgcagttagttgaaagcggcggtggtgtggtgcaaccgggtcgtagcttacgtttatcttgcgcggcctctggctttacctttagcagctatgcgatgcattgggtgcgtcaggcgccaggtaagggcttagagtgggtggcggttatctcttatgacggtagcaacaagtactacgccgatagcgttaaaggccgcttcacgattagccgcgacaacagcaaaaataccttatacttacagatgaattctttacgcgccgaggatacggccgtttattattgtgccaaaatctggcgccgctacttcgactactggggccagtggggtcaaggcacgctggtgaccgtttcttctggcggcagcagccgctcttcttcttctggcggtggtggcagcggcggtggcggcgagattgtgctgacgcagagcccagcgaccctgagcctgagcccgggcgagcgcgcgacgttaagctgccgtgccagccaatctgttagctcttcttacctggcctggtatcaacagaagccgggccaagccccgcgcctgttaatctatggcgcgtctagccgcgccacgggcatcccagcccgctttagcggctctggcagcggcacggattttaccttaacgattagccgtttagagccggaagacttcgccgtgtactactgccaacaggccaatagcttcccgccaacgttcggccagggcacgaaggttgagattaaa

SEQ ID NO: 765 - DNA, 753 bp, synthetic construct
  source 1..753: mol_type = other DNA
caggtgcagttagttgaaagcggcggtggtgtggtgcaaccgggtcgtagcttacgtttatcttgcgcggcctctggctttacctttagcagctatgcgatgcattgggtgcgtcaggcgccaggtaagggcttagagtgggtggcggttatctcttatgacggtagcaacaagtactacgccgatagcgttaaaggccgcttcacgattagccgcgacaacagcaaaaataccttatacttacagatgaattctttacgcgccgaggatacggccgtttattattgtgccaaacgccacgacgccttatgggccttcgattattggggtcaatggggccaaggcaccctggttacggttagcagcggcggctcttctcgctcttctagctctggtggcggcggctctggcggcggtggcgaaattgttctgacccaaagcccggcgaccctgagcctgagcccaggtgaacgcgccaccctgagctgtcgtgcctctcaaagcgtttcttctagctacctggcctggtatcaacagaaaccaggtcaggccccgcgcttactgatttatggtgcgtcttctcgcgcgacgggtatcccagcgcgtttttctggcagcggctctggcaccgatttcacgctgaccatttctcgcctggaaccagaggactttgccgtttattactgcaacagccgtgacagcacggacaaccatcaggcggttttcggtcaaggcacgaaagtggaaatcaaa

SEQ ID NO: 766 - DNA, 750 bp, synthetic construct
  source 1..750: mol_type = other DNA
caggtgcagttagttgaaagcggcggtggtgtggtgcaaccgggtcgtagcttacgtttatcttgcgcggcctctggctttacctttagcagctatgcgatgcattgggtgcgtcaggcgccaggtaagggcttagagtgggtggcggttatctcttatgacggtagcaacaagtactacgccgatagcgttaaaggccgcttcacgattagccgcgacaacagcaaaaataccttatacttacagatgaattctttacgcgccgaggatacggccgtttattattgtgccaaatctggttctatctggtactacttcgattattggggtcaatggggccaaggcaccctggttacggttagcagcggcggctcttctcgctcttctagctctggtggcggcggctctggcggcggtggcgaaattgttctgacccaaagcccggcgaccctgagcctgagcccaggtgaacgcgccaccctgagctgtcgtgcctctcaaagcgtttcttctagctacctggcctggtatcaacagaaaccaggtcaggccccgcgcttactgatttatggtgcgtcttctcgcgcgacgggtatcccagcgcgtttttctggcagcggctctggcaccgatttcacgctgaccatttctcgcctggaaccagaggactttgccgtttattactgccaagcgtgggattctaatacggccaactgggtgtttggccaaggtacgaaggtggagattaaa

SEQ ID NO: 767 - DNA, 744 bp, synthetic construct
  source 1..744: mol_type = other DNA
caggtgcagttagttgaaagcggcggtggtgtggtgcaaccgggtcgtagcttacgtttatcttgcgcggcctctggctttacctttagcagctatgcgatgcattgggtgcgtcaggcgccaggtaagggcttagagtgggtggcggttatctcttatgacggtagcaacaagtactacgccgatagcgttaaaggccgcttcacgattagccgcgacaacagcaaaaataccttatacttacagatgaattctttacgcgccgaggatacggccgtttattattgtgccaaatctaacgccgccacgggtgcctttgattactggggtcagtggggtcagggcaccttagttacggtgagcagcggcggttcttctcgctctagctcttctggcggcggcggtagcggcggtggcggcgaaatcgtgctgacgcagagcccggcgaccctgagcctgtctccaggcgagcgcgcgaccctgtcttgccgcgcctctcagtctgtttctagctcttatttagcgtggtaccagcagaagccaggccaagcgccacgcctgctgatttacggcgcctcttctcgtgccacgggtatcccggcgcgtttcagcggcagcggtagcggcaccgacttcaccctgaccatctctcgtctggagccagaggatttcgccgtgtactattgtcagcagtcttattctgccccaattacctttggtcaaggtacgaaagttgaaattaaa

SEQ ID NO: 768 - DNA, 753 bp, synthetic construct
  source 1..753: mol_type = other DNA
caggtgcagttagttgaaagcggcggtggtgtggtgcaaccgggtcgtagcttacgtttatcttgcgcggcctctggctttacctttagcagctatgcgatgcattgggtgcgtcaggcgccaggtaagggcttagagtgggtggcggttatctcttatgacggtagcaacaagtactacgccgatagcgttaaaggccgcttcacgattagccgcgacaacagcaaaaataccttatacttacagatgaattctttacgcgccgaggatacggccgtttattattgtgccaaagttatcccagagaaggttgccggcctggactcttggggccaatggggccagggcacgttagttaccgtgagcagcggtggttcttctcgcagctcttctagcggcggcggtggcagcggtggcggcggcgagattgtgttaacccagagcccggcgaccctgagcttatctccgggtgagcgtgcgaccttaagctgtcgcgccagccaatctgttagctctagctacctggcctggtatcagcaaaagccgggtcaggccccacgtctgctgatctatggtgcctctagccgcgccacgggtattccggcgcgctttagcggctctggcagcggcacggactttaccctgacgatcagccgtttagagccagaagacttcgcggtttattactgccaggtttgggattcttctacgaatcatgtggttttcggtcaaggcacgaaagtggaaatcaaa

SEQ ID NO: 769 - DNA, 747 bp, synthetic construct
  source 1..747: mol_type = other DNA
caggtgcagttagttgaaagcggcggtggtgtggtgcaaccgggtcgtagcttacgtttatcttgcgcggcctctggctttacctttagcagctatgcgatgcattgggtgcgtcaggcgccaggtaagggcttagagtgggtggcggttatctcttatgacggtagcaacaagtactacgccgatagcgttaaaggccgcttcacgattagccgcgacaacagcaaaaataccttatacttacagatgaattctttacgcgccgaggatacggccgtttattattgtgccaaagttaacatcggtttatacggtgtggattactggggtcagtggggtcagggcaccttagttacggtgagcagcggcggttcttctcgctctagctcttctggcggcggcggtagcggcggtggcggcgaaatcgtgctgacgcagagcccggcgaccctgagcctgtctccaggcgagcgcgcgaccctgtcttgccgcgcctctcagtctgtttctagctcttatttagcgtggtaccagcagaagccaggccaagcgccacgcctgctgatttacggcgcctcttctcgtgccacgggtatcccggcgcgtttcagcggcagcggtagcggcaccgacttcaccctgaccatctctcgtctggagccagaggatttcgccgtgtactattgtagcagctacacccgccgcaacacctatgtgttcggtcaaggtaccaaggtggaaattaaa

SEQ ID NO: 770 - DNA, 750 bp, synthetic construct
  source 1..750: mol_type = other DNA
caggtgcagttagttgaaagcggcggtggtgtggtgcaaccgggtcgtagcttacgtttatcttgcgcggcctctggctttacctttagcagctatgcgatgcattgggtgcgtcaggcgccaggtaagggcttagagtgggtggcggttatctcttatgacggtagcaacaagtactacgccgatagcgttaaaggccgcttcacgattagccgcgacaacagcaaaaataccttatacttacagatgaattctttacgcgccgaggatacggccgtttattattgtgccctggagaagcaagccccaggtgccccgggcatggactactggggccaatggggccagggcacgttagttaccgtgagcagcggtggttcttctcgcagctcttctagcggcggcggtggcagcggtggcggcggcgagattgtgttaacccagagcccggcgaccctgagcttatctccgggtgagcgtgcgaccttaagctgtcgcgccagccaatctgttagctctagctacctggcctggtatcagcaaaagccgggtcaggccccacgtctgctgatctatggtgcctctagccgcgccacgggtattccggcgcgctttagcggctctggcagcggcacggactttaccctgacgatcagccgtttagagccagaagacttcgcggtttattactgccagcaatatgacacgttaccgattaccttcggtcaaggtaccaaggtggaaattaaa

SEQ ID NO: 771 - DNA, 750 bp, synthetic construct
  source 1..750: mol_type = other DNA
caggtgcagttagttgaaagcggcggtggtgtggtgcaaccgggtcgtagcttacgtttatcttgcgcggcctctggctttacctttagcagctatgcgatgcattgggtgcgtcaggcgccaggtaagggcttagagtgggtggcggttatctcttatgacggtagcaacaagtactacgccgatagcgttaaaggccgcttcacgattagccgcgacaacagcaaaaataccttatacttacagatgaattctttacgcgccgaggatacggccgtttattattgtgccaattaccactgggacgactcttctgacggccgtatcttcgatgtttggggccagtggggccaaggtacgctggtgaccgtgtcttctggtggttctagccgctctagcagcagcggtggcggcggtagcggcggcggtggcgaaatcgtgctgacccagagcccggcgaccttatctctgtctccaggcgaacgtgccaccttatcttgtcgtgcctctcaaagcgttagctctagctacctggcgtggtaccaacagaagccgggtcaagcgccgcgtttactgatctacggtgcgtcttctcgcgccaccggcattccagcgcgtttttctggcagcggctctggtaccgattttacgttaaccatttctcgcttagaaccagaggatttcgcggtttattattgtcagacgtggggttcttgggtgtttggccaaggtacgaaggtggagattaaa

SEQ ID NO: 772 - DNA, 753 bp, synthetic construct
  source 1..753: mol_type = other DNA
caggtgcagttagttgaaagcggcggtggtgtggtgcaaccgggtcgtagcttacgtttatcttgcgcggcctctggctttacctttagcagctatgcgatgcattgggtgcgtcaggcgccaggtaagggcttagagtgggtggcggttatctcttatgacggtagcaacaagtactacgccgatagcgttaaaggccgcttcacgattagccgcgacaacagcaaaaataccttatacttacagatgaattctttacgcgccgaggatacggccgtttattattgtgcccgtgccggtggttctggttctttctatcgtttattcgattactggggccagtggggccaaggtacgctggtgaccgtgtcttctggtggttctagccgctctagcagcagcggtggcggcggtagcggcggcggtggcgaaatcgtgctgacccagagcccggcgaccttatctctgtctccaggcgaacgtgccaccttatcttgtcgtgcctctcaaagcgttagctctagctacctggcgtggtaccaacagaagccgggtcaagcgccgcgtttactgatctacggtgcgtcttctcgcgccaccggcattccagcgcgtttttctggcagcggctctggtaccgattttacgttaaccatttctcgcttagaaccagaggatttcgcggtttattattgtctgcaacacaacagctatccgttcacgttcggtcagggtaccaaagtggagatcaaa

SEQ ID NO: 773 - DNA, 771 bp, synthetic construct
  source 1..771: mol_type = other DNA
caggtgcagttagttgaaagcggcggtggtgtggtgcaaccgggtcgtagcttacgtttatcttgcgcggcctctggctttacctttagcagctatgcgatgcattgggtgcgtcaggcgccaggtaagggcttagagtgggtggcggttatctcttatgacggtagcaacaagtactacgccgatagcgttaaaggccgcttcacgattagccgcgacaacagcaaaaataccttatacttacagatgaattctttacgcgccgaggatacggccgtttattattgtgcccgtgccaactacggtttcgactacggcagcacgtactattctggcaatggcttcgactactggggccagtggggccagggtacgttagttacggtgtcttctggcggcagctctcgtagctctagcagcggcggtggcggctctggcggcggcggcgaaattgtgctgacgcaaagcccagccaccctgagcttaagcccaggtgagcgtgccacgttaagctgtcgtgccagccaaagcgtgtcttctagctacctggcctggtaccagcagaaaccaggccaagccccacgtttattaatctacggcgcgagctctcgtgcgaccggtattccggcgcgcttcagcggcagcggttctggcaccgacttcacgctgacgatcagccgcctggagccggaagactttgccgtttactattgccagcaatcttactctacccgctatacctttggtcaaggtaccaaggttgaaatcaaa

SEQ ID NO: 774 - DNA, 732 bp, synthetic construct
  source 1..732: mol_type = other DNA
caggtgcagttagttgaaagcggcggtggtgtggtgcaaccgggtcgtagcttacgtttatcttgcgcggcctctggctttacctttagcagctatgcgatgcattgggtgcgtcaggcgccaggtaagggcttagagtgggtggcggttatctcttatgacggtagcaacaagtactacgccgatagcgttaaaggccgcttcacgattagccgcgacaacagcaaaaataccttatacttacagatgaattctttacgcgccgaggatacggccgtttattattgtgcccgtgcctctgccgacgactactggggtcagtggggccaaggtaccttagtgaccgtgtcttctggtggcagcagccgttcttcttcttctggtggcggtggtagcggcggcggtggcgaaatcgtgctgacccaaagcccggccaccctgagcctgagcccgggcgaacgcgccaccttatcttgccgtgcgtctcagtctgtttctagctcttacttagcgtggtaccagcaaaaaccaggccaggccccacgtttactgatctacggcgcgagctctcgtgccacgggtattccagcccgcttcagcggcagcggtagcggcaccgactttaccctgacgatcagccgtctggagccagaagatttcgccgtttattactgtgaaacgtgggattcttttcatacggtgttcggtcaaggcaccaaagttgagatcaaa

SEQ ID NO: 775 - DNA, 756 bp, synthetic construct
  source 1..756: mol_type = other DNA
caggtgcagttagttgaaagcggcggtggtgtggtgcaaccgggtcgtagcttacgtttatcttgcgcggcctctggctttacctttagcagctatgcgatgcattgggtgcgtcaggcgccaggtaagggcttagagtgggtggcggttatctcttatgacggtagcaacaagtactacgccgatagcgttaaaggccgcttcacgattagccgcgacaacagcaaaaataccttatacttacagatgaattctttacgcgccgaggatacggccgtttattattgtgcccgtgacgccgcctacggtgacgttgtgcgtccagcctttgactattggggccagtggggtcaaggtaccctggtgaccgtttcttctggtggtagctctcgcagcagcagctctggcggcggtggcagcggcggtggcggcgagattgtgctgacccagagcccggcgacgttaagcttatctccgggcgaacgcgcgacgttatcttgccgcgcctctcagtctgtgtctagctcttatctggcctggtaccagcaaaaaccaggtcaggcgccgcgcctgttaatctacggcgcctcttctcgcgcgaccggcatcccggcgcgtttcagcggcagcggttctggcaccgatttcacgctgaccatctctcgcctggagccagaagactttgccgtgtattactgcttacaacacaatagctatccattaacgttcggccaaggcaccaaagttgagatcaaa

SEQ ID NO: 776 - DNA, 741 bp, synthetic construct
  source 1..741: mol_type = other DNA
caggtgcagttagttgaaagcggcggtggtgtggtgcaaccgggtcgtagcttacgtttatcttgcgcggcctctggctttacctttagcagctatgcgatgcattgggtgcgtcaggcgccaggtaagggcttagagtgggtggcggttatctcttatgacggtagcaacaagtactacgccgatagcgttaaaggccgcttcacgattagccgcgacaacagcaaaaataccttatacttacagatgaattctttacgcgccgaggatacggccgtttattattgtgcccgtgacgccggttctggtttagactattggggccaatggggtcagggtaccctggtgacggtttctagcggcggcagctctcgctcttcttctagcggtggtggcggcagcggtggcggcggtgaaattgtgttaacccagtctccggcgaccctgagcctgagcccgggtgagcgtgccacgctgagctgccgcgcgtctcaatctgtgtcttcttcttatttagcgtggtaccagcaaaaaccgggtcaagcgccacgtttattaatttatggcgccagctctcgcgccaccggtatcccagcccgttttagcggtagcggcagcggtaccgattttacgttaaccattagccgcttagaaccggaggacttcgcggtttactattgtcaggcctgggatagctctccgggtttcgtttttggccagggtacgaaggttgaaatcaaa

SEQ ID NO: 777 - DNA, 768 bp, synthetic construct
  source 1..768: mol_type = other DNA
caggtgcagttagttgaaagcggcggtggtgtggtgcaaccgggtcgtagcttacgtttatcttgcgcggcctctggctttacctttagcagctatgcgatgcattgggtgcgtcaggcgccaggtaagggcttagagtgggtggcggttatctcttatgacggtagcaacaagtactacgccgatagcgttaaaggccgcttcacgattagccgcgacaacagcaaaaataccttatacttacagatgaattctttacgcgccgaggatacggccgtttattattgtgcccgtgacgccacgatcttaggtttagatgcgcacggtcatggttttgatcattggggtcaatggggtcagggcaccctggttacggtttcttctggcggttctagccgtagctctagcagcggtggcggcggctctggcggcggtggcgaaattgtgctgacccagagcccagccaccttatctctgagcccgggtgaacgcgccacgctgtcttgtcgcgcgtctcagtctgtgtctagcagctacttagcgtggtaccagcaaaagccgggccaggccccgcgcttattaatttacggtgcctctagccgtgcgacgggcattccggcccgttttagcggttctggcagcggcacggactttaccttaacgatcagccgcttagaaccagaagactttgcggtttattactgtcaacagtatggctcttggccaccatcttttacgtttggccagggtacgaaggtggagatcaaa

SEQ ID NO: 778 - DNA, 756 bp, synthetic construct
  source 1..756: mol_type = other DNA
caggtgcagttagttgaaagcggcggtggtgtggtgcaaccgggtcgtagcttacgtttatcttgcgcggcctctggctttacctttagcagctatgcgatgcattgggtgcgtcaggcgccaggtaagggcttagagtgggtggcggttatctcttatgacggtagcaacaagtactacgccgatagcgttaaaggccgcttcacgattagccgcgacaacagcaaaaataccttatacttacagatgaattctttacgcgccgaggatacggccgtttattattgtgcccgtgacgactcttaccgcggtccactgcatggttactttgactattggggccagtggggtcaaggtaccctggtgaccgtttcttctggtggtagctctcgcagcagcagctctggcggcggtggcagcggcggtggcggcgagattgtgctgacccagagcccggcgacgttaagcttatctccgggcgaacgcgcgacgttatcttgccgcgcctctcagtctgtgtctagctcttatctggcctggtaccagcaaaaaccaggtcaggcgccgcgcctgttaatctacggcgcctcttctcgcgcgaccggcatcccggcgcgtttcagcggcagcggttctggcaccgatttcacgctgaccatctctcgcctggagccagaagactttgccgtgtattactgccaacaatcttatagcccgccaccaacgttcggccaaggcaccaaagttgagatcaaa

SEQ ID NO: 779 - DNA, 744 bp, synthetic construct
  source 1..744: mol_type = other DNA
caggtgcagttagttgaaagcggcggtggtgtggtgcaaccgggtcgtagcttacgtttatcttgcgcggcctctggctttacctttagcagctatgcgatgcattgggtgcgtcaggcgccaggtaagggcttagagtgggtggcggttatctcttatgacggtagcaacaagtactacgccgatagcgttaaaggccgcttcacgattagccgcgacaacagcaaaaataccttatacttacagatgaattctttacgcgccgaggatacggccgtttattattgtgcccgtgacggtggtgacgttatgccattcgattattggggtcaatggggccaaggcaccctggttacggttagcagcggcggctcttctcgctcttctagctctggtggcggcggctctggcggcggtggcgaaattgttctgacccaaagcccggcgaccctgagcctgagcccaggtgaacgcgccaccctgagctgtcgtgcctctcaaagcgtttcttctagctacctggcctggtatcaacagaaaccaggtcaggccccgcgcttactgatttatggtgcgtcttctcgcgcgacgggtatcccagcgcgtttttctggcagcggctctggcaccgatttcacgctgaccatttctcgcctggaaccagaggactttgccgtttattactgcaagcagtatgacagcttcccaatcacctttggccaaggtacgaaggtggagattaaa

SEQ ID NO: 780 - DNA, 747 bp, synthetic construct
  source 1..747: mol_type = other DNA
caggtgcagttagttgaaagcggcggtggtgtggtgcaaccgggtcgtagcttacgtttatcttgcgcggcctctggctttacctttagcagctatgcgatgcattgggtgcgtcaggcgccaggtaagggcttagagtgggtggcggttatctcttatgacggtagcaacaagtactacgccgatagcgttaaaggccgcttcacgattagccgcgacaacagcaaaaataccttatacttacagatgaattctttacgcgccgaggatacggccgtttattattgtgcccgtgacggtggtgttgccgccgttgatgattggggtcaatggggccaaggcaccctggttacggttagcagcggcggctcttctcgctcttctagctctggtggcggcggctctggcggcggtggcgaaattgttctgacccaaagcccggcgaccctgagcctgagcccaggtgaacgcgccaccctgagctgtcgtgcctctcaaagcgtttcttctagctacctggcctggtatcaacagaaaccaggtcaggccccgcgcttactgatttatggtgcgtcttctcgcgcgacgggtatcccagcgcgtttttctggcagcggctctggcaccgatttcacgctgaccatttctcgcctggaaccagaggactttgccgtttattactgctctagctatacgagctcttctacgctggtggtgttcggtcaaggtaccaaggtggaaattaaa

SEQ ID NO: 781 - DNA, 750 bp, synthetic construct
  source 1..750: mol_type = other DNA
caggtgcagttagttgaaagcggcggtggtgtggtgcaaccgggtcgtagcttacgtttatcttgcgcggcctctggctttacctttagcagctatgcgatgcattgggtgcgtcaggcgccaggtaagggcttagagtgggtggcggttatctcttatgacggtagcaacaagtactacgccgatagcgttaaaggccgcttcacgattagccgcgacaacagcaaaaataccttatacttacagatgaattctttacgcgccgaggatacggccgtttattattgtgcccgtgacggtttaaagggttacttcggccattggggtcaatggggccaaggcaccctggttacggttagcagcggcggctcttctcgctcttctagctctggtggcggcggctctggcggcggtggcgaaattgttctgacccaaagcccggcgaccctgagcctgagcccaggtgaacgcgccaccctgagctgtcgtgcctctcaaagcgtttcttctagctacctggcctggtatcaacagaaaccaggtcaggccccgcgcttactgatttatggtgcgtcttctcgcgcgacgggtatcccagcgcgtttttctggcagcggctctggcaccgatttcacgctgaccatttctcgcctggaaccagaggactttgccgtttattactgctctagctatacgagctcttcttctggcctggtggttttcggtcaaggcacgaaagtggaaatcaaa

SEQ ID NO: 782 - DNA, 765 bp, synthetic construct
  source 1..765: mol_type = other DNA
caggtgcagttagttgaaagcggcggtggtgtggtgcaaccgggtcgtagcttacgtttatcttgcgcggcctctggctttacctttagcagctatgcgatgcattgggtgcgtcaggcgccaggtaagggcttagagtgggtggcggttatctcttatgacggtagcaacaagtactacgccgatagcgttaaaggccgcttcacgattagccgcgacaacagcaaaaataccttatacttacagatgaattctttacgcgccgaggatacggccgtttattattgtgcccgtgacggttctacgacgggtatcagctggggctacggtctggacccgtggggccagtggggtcaaggtaccctggtgaccgtttcttctggtggtagctctcgcagcagcagctctggcggcggtggcagcggcggtggcggcgagattgtgctgacccagagcccggcgacgttaagcttatctccgggcgaacgcgcgacgttatcttgccgcgcctctcagtctgtgtctagctcttatctggcctggtaccagcaaaaaccaggtcaggcgccgcgcctgttaatctacggcgcctcttctcgcgcgaccggcatcccggcgcgtttcagcggcagcggttctggcaccgatttcacgctgaccatctctcgcctggagccagaagactttgccgtgtattactgcgttggttgggacggcagcctgtctggtgaggtttttggtcagggcaccaaggttgagattaaa

SEQ ID NO: 783 - DNA, 777 bp, synthetic construct
  source 1..777: mol_type = other DNA
caggtgcagttagttgaaagcggcggtggtgtggtgcaaccgggtcgtagcttacgtttatcttgcgcggcctctggctttacctttagcagctatgcgatgcattgggtgcgtcaggcgccaggtaagggcttagagtgggtggcggttatctcttatgacggtagcaacaagtactacgccgatagcgttaaaggccgcttcacgattagccgcgacaacagcaaaaataccttatacttacagatgaattctttacgcgccgaggatacggccgtttattattgtgcccgtgacggttacttctaccgccgcaatgtgacgacgtataacagcagctatatggactactggggtcagtggggccagggcacgttagttacggttagctctggtggcagcagccgcagcagctctagcggcggcggtggcagcggtggcggcggcgaaattgtgctgacccaatctccggccacgctgagcctgtctccgggtgagcgcgcgacgttatcttgccgcgcgtctcagtctgtgagctcttcttatttagcgtggtaccaacagaaaccgggtcaggccccacgcctgttaatctacggtgcgagcagccgcgcgaccggcatcccggcgcgtttctctggcagcggctctggtaccgatttcacgttaaccatctctcgtttagaaccagaagatttcgcggtttactactgccagagctacgactctatcaatcgcgatgtggtgttcggtcaaggcacgaaggtggagattaaa

SEQ ID NO: 784 - DNA, 777 bp, synthetic construct
  source 1..777: mol_type = other DNA
caggtgcagttagttgaaagcggcggtggtgtggtgcaaccgggtcgtagcttacgtttatcttgcgcggcctctggctttacctttagcagctatgcgatgcattgggtgcgtcaggcgccaggtaagggcttagagtgggtggcggttatctcttatgacggtagcaacaagtactacgccgatagcgttaaaggccgcttcacgattagccgcgacaacagcaaaaataccttatacttacagatgaattctttacgcgccgaggatacggccgtttattattgtgcccgtgacggttacttctaccgccgcaatgtgacgacgtattacagcagctatatggactactggggtcagtggggccagggcacgttagttacggttagctctggtggcagcagccgcagcagctctagcggcggcggtggcagcggtggcggcggcgaaattgtgctgacccaatctccggccacgctgagcctgtctccgggtgagcgcgcgacgttatcttgccgcgcgtctcagtctgtgagctcttcttatttagcgtggtaccaacagaaaccgggtcaggccccacgcctgttaatctacggtgcgagcagccgcgcgaccggcatcccggcgcgtttctctggcagcggctctggtaccgatttcacgttaaccatctctcgtttagaaccagaagatttcgcggtttactactgcggcgcgtgggactctcgctctaatgtttatgtgtttggtcaaggtaccaaggttgaaatcaaa

SEQ ID NO: 785 - DNA, 777 bp, synthetic construct
  source 1..777: mol_type = other DNA
caggtgcagttagttgaaagcggcggtggtgtggtgcaaccgggtcgtagcttacgtttatcttgcgcggcctctggctttacctttagcagctatgcgatgcattgggtgcgtcaggcgccaggtaagggcttagagtgggtggcggttatctcttatgacggtagcaacaagtactacgccgatagcgttaaaggccgcttcacgattagccgcgacaacagcaaaaataccttatacttacagatgaattctttacgcgccgaggatacggccgtttattattgtgcccgtgacggttacttctaccgccgcaatgtgacgacgtattacagcagctatatggactactggggtcagtggggccagggcacgttagttacggttagctctggtggcagcagccgcagcagctctagcggcggcggtggcagcggtggcggcggcgaaattgtgctgacccaatctccggccacgctgagcctgtctccgggtgagcgcgcgacgttatcttgccgcgcgtctcagtctgtgagctcttcttatttagcgtggtaccaacagaaaccgggtcaggccccacgcctgttaatctacggtgcgagcagccgcgcgaccggcatcccggcgcgtttctctggcagcggctctggtaccgatttcacgttaaccatctctcgtttagaaccagaagatttcgcggtttactactgcggcacctgggactcttctttaagcgccggcgtgtttggtcaaggtaccaaggttgaaatcaaa

SEQ ID NO: 786 - DNA, 771 bp, synthetic construct
  source 1..771: mol_type = other DNA
caggtgcagttagttgaaagcggcggtggtgtggtgcaaccgggtcgtagcttacgtttatcttgcgcggcctctggctttacctttagcagctatgcgatgcattgggtgcgtcaggcgccaggtaagggcttagagtgggtggcggttatctcttatgacggtagcaacaagtactacgccgatagcgttaaaggccgcttcacgattagccgcgacaacagcaaaaataccttatacttacagatgaattctttacgcgccgaggatacggccgtttattattgtgcccgtgacggttacttctaccgccgcaatgtgacgacgtattacagcagctatatggactactggggtcagtggggccagggcacgttagttacggttagctctggtggcagcagccgcagcagctctagcggcggcggtggcagcggtggcggcggcgaaattgtgctgacccaatctccggccacgctgagcctgtctccgggtgagcgcgcgacgttatcttgccgcgcgtctcagtctgtgagctcttcttatttagcgtggtaccaacagaaaccgggtcaggccccacgcctgttaatctacggtgcgagcagccgcgcgaccggcatcccggcgcgtttctctggcagcggctctggtaccgatttcacgttaaccatctctcgtttagaaccagaagatttcgcggtttactactgccaggcgtgggactctcgcacggtggtttttggccagggtacgaaggtggagatcaaa

SEQ ID NO: 787 - DNA, 744 bp, synthetic construct
  source 1..744: mol_type = other DNA
caggtgcagttagttgaaagcggcggtggtgtggtgcaaccgggtcgtagcttacgtttatcttgcgcggcctctggctttacctttagcagctatgcgatgcattgggtgcgtcaggcgccaggtaagggcttagagtgggtggcggttatctcttatgacggtagcaacaagtactacgccgatagcgttaaaggccgcttcacgattagccgcgacaacagcaaaaataccttatacttacagatgaattctttacgcgccgaggatacggccgtttattattgtgcccgtgacaagggtggtatgtacggtttcgattattggggtcaatggggccaaggcaccctggttacggttagcagcggcggctcttctcgctcttctagctctggtggcggcggctctggcggcggtggcgaaattgttctgacccaaagcccggcgaccctgagcctgagcccaggtgaacgcgccaccctgagctgtcgtgcctctcaaagcgtttcttctagctacctggcctggtatcaacagaaaccaggtcaggccccgcgcttactgatttatggtgcgtcttctcgcgcgacgggtatcccagcgcgtttttctggcagcggctctggcaccgatttcacgctgaccatttctcgcctggaaccagaggactttgccgtttattactgcaagcagtatgacagcttcccaatcacctttggccaaggtacgaaggtggagattaaa

SEQ ID NO: 788 - DNA, 738 bp, synthetic construct
  source 1..738: mol_type = other DNA
caggtgcagttagttgaaagcggcggtggtgtggtgcaaccgggtcgtagcttacgtttatcttgcgcggcctctggctttacctttagcagctatgcgatgcattgggtgcgtcaggcgccaggtaagggcttagagtgggtggcggttatctcttatgacggtagcaacaagtactacgccgatagcgttaaaggccgcttcacgattagccgcgacaacagcaaaaataccttatacttacagatgaattctttacgcgccgaggatacggccgtttattattgtgcccgtgacttaggtggtcgcttcacgtattggggccaatggggtcagggtaccctggtgacggtttctagcggcggcagctctcgctcttcttctagcggtggtggcggcagcggtggcggcggtgaaattgtgttaacccagtctccggcgaccctgagcctgagcccgggtgagcgtgccacgctgagctgccgcgcgtctcaatctgtgtcttcttcttatttagcgtggtaccagcaaaaaccgggtcaagcgccacgtttattaatttatggcgccagctctcgcgccaccggtatcccagcccgttttagcggtagcggcagcggtaccgattttacgttaaccattagccgcttagaaccggaggacttcgcggtttactattgtcagcaacatagctctccgccaatcacgtttggccagggtacgaaggttgaaatcaaa

SEQ ID NO: 789 - DNA, 747 bp, synthetic construct
  source 1..747: mol_type = other DNA
caggtgcagttagttgaaagcggcggtggtgtggtgcaaccgggtcgtagcttacgtttatcttgcgcggcctctggctttacctttagcagctatgcgatgcattgggtgcgtcaggcgccaggtaagggcttagagtgggtggcggttatctcttatgacggtagcaacaagtactacgccgatagcgttaaaggccgcttcacgattagccgcgacaacagcaaaaataccttatacttacagatgaattctttacgcgccgaggatacggccgtttattattgtgcccgtgacttaccaggttacttaacgtttgattactggggtcagtggggtcagggcaccttagttacggtgagcagcggcggttcttctcgctctagctcttctggcggcggcggtagcggcggtggcggcgaaatcgtgctgacgcagagcccggcgaccctgagcctgtctccaggcgagcgcgcgaccctgtcttgccgcgcctctcagtctgtttctagctcttatttagcgtggtaccagcagaagccaggccaagcgccacgcctgctgatttacggcgcctcttctcgtgccacgggtatcccggcgcgtttcagcggcagcggtagcggcaccgacttcaccctgaccatctctcgtctggagccagaggatttcgccgtgtactattgtcagcagcgcagcaactctccaggcgtgaccttcggtcaaggtaccaaggtggaaattaaa

SEQ ID NO: 790 - DNA, 753 bp, synthetic construct
  source 1..753: mol_type = other DNA
caggtgcagttagttgaaagcggcggtggtgtggtgcaaccgggtcgtagcttacgtttatcttgcgcggcctctggctttacctttagcagctatgcgatgcattgggtgcgtcaggcgccaggtaagggcttagagtgggtggcggttatctcttatgacggtagcaacaagtactacgccgatagcgttaaaggccgcttcacgattagccgcgacaacagcaaaaataccttatacttacagatgaattctttacgcgccgaggatacggccgtttattattgtgcccgtgacttacgcggtgcctggggtccaggcggcttcgacgtgtggggtcagtggggccagggtacgttagtgaccgtgagctctggtggttcttctcgttcttctagcagcggcggtggcggctctggcggcggcggtgaaattgttctgacccagagcccggcgaccctgtctttaagcccaggtgaacgtgcgacgctgtcttgtcgcgcgtctcaatctgtgtctagctcttatttagcgtggtatcaacaaaaaccaggccaagccccgcgtctgttaatttacggtgccagctctcgcgccacgggcattccggcccgttttagcggtagcggcagcggtacggattttaccttaacgattagccgcttagagccggaggactttgccgtgtactattgccaacagtactacacgaccccggtgacgttcggtcaaggcacgaaagtggaaatcaaa

SEQ ID NO: 791 - DNA, 774 bp, synthetic construct
  source 1..774: mol_type = other DNA
caggtgcagttagttgaaagcggcggtggtgtggtgcaaccgggtcgtagcttacgtttatcttgcgcggcctctggctttacctttagcagctatgcgatgcattgggtgcgtcaggcgccaggtaagggcttagagtgggtggcggttatctcttatgacggtagcaacaagtactacgccgatagcgttaaaggccgcttcacgattagccgcgacaacagcaaaaataccttatacttacagatgaattctttacgcgccgaggatacggccgtttattattgtgcccgtgacttaacgggttaccgctctcgtagctaccaatgggatggtatggatgtgtggggccaatggggtcaaggcaccctggtgacggtttcttctggtggctcttctcgtagcagctctagcggcggtggcggcagcggtggcggcggtgaaattgtgctgacccagagcccggccacgctgtctttaagcccgggcgagcgtgccacgttaagctgtcgcgccagccaaagcgttagctctagctatttagcctggtatcaacagaagccaggccaggcgccacgtttattaatctatggtgcctcttctcgtgcgaccggtattccggcgcgctttagcggctctggtagcggcaccgacttcaccctgacgatctctcgtttagagccggaggatttcgcggtgtactattgtgcctcttgggatgatagcttaaactctggttgggtgttcggccagggcacgaaggttgaaatcaaa

SEQ ID NO: 792 - DNA, 747 bp, synthetic construct
  source 1..747: mol_type = other DNA
caggtgcagttagttgaaagcggcggtggtgtggtgcaaccgggtcgtagcttacgtttatcttgcgcggcctctggctttacctttagcagctatgcgatgcattgggtgcgtcaggcgccaggtaagggcttagagtgggtggcggttatctcttatgacggtagcaacaagtactacgccgatagcgttaaaggccgcttcacgattagccgcgacaacagcaaaaataccttatacttacagatgaattctttacgcgccgaggatacggccgtttattattgtgcccgtgacttatacgccatcggtgccggcatggatccatggggtcagtggggtcagggcaccttagttacggtgagcagcggcggttcttctcgctctagctcttctggcggcggcggtagcggcggtggcggcgaaatcgtgctgacgcagagcccggcgaccctgagcctgtctccaggcgagcgcgcgaccctgtcttgccgcgcctctcagtctgtttctagctcttatttagcgtggtaccagcagaagccaggccaagcgccacgcctgctgatttacggcgcctcttctcgtgccacgggtatcccggcgcgtttcagcggcagcggtagcggcaccgacttcaccctgaccatctctcgtctggagccagaggatttcgccgtgtactattgtcagacctgggacagcttcggtcaagtgtttggccaaggtacgaaggtggagattaaa

SEQ ID NO: 793 - DNA, 750 bp, synthetic construct
  source 1..750: mol_type = other DNA
caggtgcagttagttgaaagcggcggtggtgtggtgcaaccgggtcgtagcttacgtttatcttgcgcggcctctggctttacctttagcagctatgcgatgcattgggtgcgtcaggcgccaggtaagggcttagagtgggtggcggttatctcttatgacggtagcaacaagtactacgccgatagcgttaaaggccgcttcacgattagccgcgacaacagcaaaaataccttatacttacagatgaattctttacgcgccgaggatacggccgtttattattgtgcccgtgacatggccggttacaactggatcgacttttggggccaatggggtcagggtaccctggtgacggtttctagcggcggcagctctcgctcttcttctagcggtggtggcggcagcggtggcggcggtgaaattgtgttaacccagtctccggcgaccctgagcctgagcccgggtgagcgtgccacgctgagctgccgcgcgtctcaatctgtgtcttcttcttatttagcgtggtaccagcaaaaaccgggtcaagcgccacgtttattaatttatggcgccagctctcgcgccaccggtatcccagcccgttttagcggtagcggcagcggtaccgattttacgttaaccattagccgcttagaaccggaggacttcgcggtttactattgtgcggcctgggatgattctctgaacttaccagtgtttggccaaggtacgaaggtggagattaaa

SEQ ID NO: 794 - DNA, 759 bp, synthetic construct
  source 1..759: mol_type = other DNA
caggtgcagttagttgaaagcggcggtggtgtggtgcaaccgggtcgtagcttacgtttatcttgcgcggcctctggctttacctttagcagctatgcgatgcattgggtgcgtcaggcgccaggtaagggcttagagtgggtggcggttatctcttatgacggtagcaacaagtactacgccgatagcgttaaaggccgcttcacgattagccgcgacaacagcaaaaataccttatacttacagatgaattctttacgcgccgaggatacggccgtttattattgtgcccgtgacccacgcggttggggttacgcctatggcgacttctggggccaatggggccagggcacgttagttaccgtgagcagcggtggttcttctcgcagctcttctagcggcggcggtggcagcggtggcggcggcgagattgtgttaacccagagcccggcgaccctgagcttatctccgggtgagcgtgcgaccttaagctgtcgcgccagccaatctgttagctctagctacctggcctggtatcagcaaaagccgggtcaggccccacgtctgctgatctatggtgcctctagccgcgccacgggtattccggcgcgctttagcggctctggcagcggcacggactttaccctgacgatcagccgtttagagccagaagacttcgcggtttattactgcgcggcctgggattcttcttctggccgtcgttgggttttcggtcaaggcacgaaagtggaaatcaaa

SEQ ID NO: 795 - DNA, 741 bp, synthetic construct
  source 1..741: mol_type = other DNA
caggtgcagttagttgaaagcggcggtggtgtggtgcaaccgggtcgtagcttacgtttatcttgcgcggcctctggctttacctttagcagctatgcgatgcattgggtgcgtcaggcgccaggtaagggcttagagtgggtggcggttatctcttatgacggtagcaacaagtactacgccgatagcgttaaaggccgcttcacgattagccgcgacaacagcaaaaataccttatacttacagatgaattctttacgcgccgaggatacggccgtttattattgtgcccgtgacccatctggtcacggtatggacgtgtggggccaatggggtcagggtaccctggtgacggtttctagcggcggcagctctcgctcttcttctagcggtggtggcggcagcggtggcggcggtgaaattgtgttaacccagtctccggcgaccctgagcctgagcccgggtgagcgtgccacgctgagctgccgcgcgtctcaatctgtgtcttcttcttatttagcgtggtaccagcaaaaaccgggtcaagcgccacgtttattaatttatggcgccagctctcgcgccaccggtatcccagcccgttttagcggtagcggcagcggtaccgattttacgttaaccattagccgcttagaaccggaggacttcgcggtttactattgtcagcaaagctattctctgccacgcacgtttggccagggtacgaaggttgaaatcaaa

SEQ ID NO: 796 - DNA, 753 bp, synthetic construct
  source 1..753: mol_type = other DNA
caggtgcagttagttgaaagcggcggtggtgtggtgcaaccgggtcgtagcttacgtttatcttgcgcggcctctggctttacctttagcagctatgcgatgcattgggtgcgtcaggcgccaggtaagggcttagagtgggtggcggttatctcttatgacggtagcaacaagtactacgccgatagcgttaaaggccgcttcacgattagccgcgacaacagcaaaaataccttatacttacagatgaattctttacgcgccgaggatacggccgtttattattgtgcccgtgaccaaggttactacggtggtagccgtgcctctgaatactggggccagtggggccaaggtacgctggtgaccgtgtcttctggtggttctagccgctctagcagcagcggtggcggcggtagcggcggcggtggcgaaatcgtgctgacccagagcccggcgaccttatctctgtctccaggcgaacgtgccaccttatcttgtcgtgcctctcaaagcgttagctctagctacctggcgtggtaccaacagaagccgggtcaagcgccgcgtttactgatctacggtgcgtcttctcgcgccaccggcattccagcgcgtttttctggcagcggctctggtaccgattttacgttaaccatttctcgcttagaaccagaggatttcgcggtttattattgtcagcaatactacaatccgccgcaaacgttcggtcagggtaccaaagtggagatcaaa

SEQ ID NO: 797 - DNA, 750 bp, synthetic construct
  source 1..750: mol_type = other DNA
caggtgcagttagttgaaagcggcggtggtgtggtgcaaccgggtcgtagcttacgtttatcttgcgcggcctctggctttacctttagcagctatgcgatgcattgggtgcgtcaggcgccaggtaagggcttagagtgggtggcggttatctcttatgacggtagcaacaagtactacgccgatagcgttaaaggccgcttcacgattagccgcgacaacagcaaaaataccttatacttacagatgaattctttacgcgccgaggatacggccgtttattattgtgcccgtgaccgcgccggtgacggtatggacggctggggccaatggggtcagggtaccctggtgacggtttctagcggcggcagctctcgctcttcttctagcggtggtggcggcagcggtggcggcggtgaaattgtgttaacccagtctccggcgaccctgagcctgagcccgggtgagcgtgccacgctgagctgccgcgcgtctcaatctgtgtcttcttcttatttagcgtggtaccagcaaaaaccgggtcaagcgccacgtttattaatttatggcgccagctctcgcgccaccggtatcccagcccgttttagcggtagcggcagcggtaccgattttacgttaaccattagccgcttagaaccggaggacttcgcggtttactattgtcagtcttatgattctagcttaaacccatatgtggtgttcggtcaaggtaccaaggtggaaattaaa

SEQ ID NO: 798 - DNA, 750 bp, synthetic construct
  source 1..750: mol_type = other DNA
caggtgcagttagttgaaagcggcggtggtgtggtgcaaccgggtcgtagcttacgtttatcttgcgcggcctctggctttacctttagcagctatgcgatgcattgggtgcgtcaggcgccaggtaagggcttagagtgggtggcggttatctcttatgacggtagcaacaagtactacgccgatagcgttaaaggccgcttcacgattagccgcgacaacagcaaaaataccttatacttacagatgaattctttacgcgccgaggatacggccgtttattattgtgcccgtgaccgcggtggtcgcgacggttatggcatggacgtttggggccaatggggccagggcacgttagttaccgtgagcagcggtggttcttctcgcagctcttctagcggcggcggtggcagcggtggcggcggcgagattgtgttaacccagagcccggcgaccctgagcttatctccgggtgagcgtgcgaccttaagctgtcgcgccagccaatctgttagctctagctacctggcctggtatcagcaaaagccgggtcaggccccacgtctgctgatctatggtgcctctagccgcgccacgggtattccggcgcgctttagcggctctggcagcggcacggactttaccctgacgatcagccgtttagagccagaagacttcgcggtttattactgccagcaagcggacaacttcccgctgaccttcggtcaaggtaccaaggtggaaattaaa

SEQ ID NO: 799 - DNA, 750 bp, synthetic construct
  source 1..750: mol_type = other DNA
caggtgcagttagttgaaagcggcggtggtgtggtgcaaccgggtcgtagcttacgtttatcttgcgcggcctctggctttacctttagcagctatgcgatgcattgggtgcgtcaggcgccaggtaagggcttagagtgggtggcggttatctcttatgacggtagcaacaagtactacgccgatagcgttaaaggccgcttcacgattagccgcgacaacagcaaaaataccttatacttacagatgaattctttacgcgccgaggatacggccgtttattattgtgcccgtgaccgcggtggtcgcgacggttatggcatggacgtttggggccaatggggccagggcacgttagttaccgtgagcagcggtggttcttctcgcagctcttctagcggcggcggtggcagcggtggcggcggcgagattgtgttaacccagagcccggcgaccctgagcttatctccgggtgagcgtgcgaccttaagctgtcgcgccagccaatctgttagctctagctacctggcctggtatcagcaaaagccgggtcaggccccacgtctgctgatctatggtgcctctagccgcgccacgggtattccggcgcgctttagcggctctggcagcggcacggactttaccctgacgatcagccgtttagagccagaagacttcgcggtttattactgccagcaagaagacaactacccgctgaccttcggtcaaggtaccaaggtggaaattaaa

SEQ ID NO: 800 - DNA, 750 bp, synthetic construct
  source 1..750: mol_type = other DNA
caggtgcagttagttgaaagcggcggtggtgtggtgcaaccgggtcgtagcttacgtttatcttgcgcggcctctggctttacctttagcagctatgcgatgcattgggtgcgtcaggcgccaggtaagggcttagagtgggtggcggttatctcttatgacggtagcaacaagtactacgccgatagcgttaaaggccgcttcacgattagccgcgacaacagcaaaaataccttatacttacagatgaattctttacgcgccgaggatacggccgtttattattgtgcccgtgaccgcggtggtcgcgacggttatggcatggacgtttggggccaatggggccagggcacgttagttaccgtgagcagcggtggttcttctcgcagctcttctagcggcggcggtggcagcggtggcggcggcgagattgtgttaacccagagcccggcgaccctgagcttatctccgggtgagcgtgcgaccttaagctgtcgcgccagccaatctgttagctctagctacctggcctggtatcagcaaaagccgggtcaggccccacgtctgctgatctatggtgcctctagccgcgccacgggtattccggcgcgctttagcggctctggcagcggcacggactttaccctgacgatcagccgtttagagccagaagacttcgcggtttattactgccagcaagaagactctccaccgctgaccttcggtcaaggtaccaaggtggaaattaaa

SEQ ID NO: 801 - DNA, 750 bp, synthetic construct
  source 1..750: mol_type = other DNA
caggtgcagttagttgaaagcggcggtggtgtggtgcaaccgggtcgtagcttacgtttatcttgcgcggcctctggctttacctttagcagctatgcgatgcattgggtgcgtcaggcgccaggtaagggcttagagtgggtggcggttatctcttatgacggtagcaacaagtactacgccgatagcgttaaaggccgcttcacgattagccgcgacaacagcaaaaataccttatacttacagatgaattctttacgcgccgaggatacggccgtttattattgtgcccgtgaccgcggtggtcgcgacggttatggcatggacgtttggggccaatggggccagggcacgttagttaccgtgagcagcggtggttcttctcgcagctcttctagcggcggcggtggcagcggtggcggcggcgagattgtgttaacccagagcccggcgaccctgagcttatctccgggtgagcgtgcgaccttaagctgtcgcgccagccaatctgttagctctagctacctggcctggtatcagcaaaagccgggtcaggccccacgtctgctgatctatggtgcctctagccgcgccacgggtattccggcgcgctttagcggctctggcagcggcacggactttaccctgacgatcagccgtttagagccagaagacttcgcggtttattactgccagcaaagctactctccaccgccgaccttcggtcaaggtaccaaggtggaaattaaa

SEQ ID NO: 802 - DNA, 744 bp, synthetic construct
  source 1..744: mol_type = other DNA
caggtgcagttagttgaaagcggcggtggtgtggtgcaaccgggtcgtagcttacgtttatcttgcgcggcctctggctttacctttagcagctatgcgatgcattgggtgcgtcaggcgccaggtaagggcttagagtgggtggcggttatctcttatgacggtagcaacaagtactacgccgatagcgttaaaggccgcttcacgattagccgcgacaacagcaaaaataccttatacttacagatgaattctttacgcgccgaggatacggccgtttattattgtgcccgtgaccgcggtacgttcccattatttgattcttggggtcagtggggtcagggcaccttagttacggtgagcagcggcggttcttctcgctctagctcttctggcggcggcggtagcggcggtggcggcgaaatcgtgctgacgcagagcccggcgaccctgagcctgtctccaggcgagcgcgcgaccctgtcttgccgcgcctctcagtctgtttctagctcttatttagcgtggtaccagcagaagccaggccaagcgccacgcctgctgatttacggcgcctcttctcgtgccacgggtatcccggcgcgtttcagcggcagcggtagcggcaccgacttcaccctgaccatctctcgtctggagccagaggatttcgccgtgtactattgtggcagctacgcggacggtcgctatgtgtttggtcaaggtacgaaagttgaaattaaa

SEQ ID NO: 803 - DNA, 765 bp, synthetic construct
  source 1..765: mol_type = other DNA
caggtgcagttagttgaaagcggcggtggtgtggtgcaaccgggtcgtagcttacgtttatcttgcgcggcctctggctttacctttagcagctatgcgatgcattgggtgcgtcaggcgccaggtaagggcttagagtgggtggcggttatctcttatgacggtagcaacaagtactacgccgatagcgttaaaggccgcttcacgattagccgcgacaacagcaaaaataccttatacttacagatgaattctttacgcgccgaggatacggccgtttattattgtgcccgtgaccgcggttaccgcggttactatgcgggtaactggtttgacccgtggggccagtggggtcaaggtaccctggtgaccgtttcttctggtggtagctctcgcagcagcagctctggcggcggtggcagcggcggtggcggcgagattgtgctgacccagagcccggcgacgttaagcttatctccgggcgaacgcgcgacgttatcttgccgcgcctctcagtctgtgtctagctcttatctggcctggtaccagcaaaaaccaggtcaggcgccgcgcctgttaatctacggcgcctcttctcgcgcgaccggcatcccggcgcgtttcagcggcagcggttctggcaccgatttcacgctgaccatctctcgcctggagccagaagactttgccgtgtattactgccaagcctgggacagcagcaccaaccacgttgtttttggtcagggcaccaaggttgagattaaa

SEQ ID NO: 804 - DNA, 759 bp, synthetic construct
  source 1..759: mol_type = other DNA
caggtgcagttagttgaaagcggcggtggtgtggtgcaaccgggtcgtagcttacgtttatcttgcgcggcctctggctttacctttagcagctatgcgatgcattgggtgcgtcaggcgccaggtaagggcttagagtgggtggcggttatctcttatgacggtagcaacaagtactacgccgatagcgttaaaggccgcttcacgattagccgcgacaacagcaaaaataccttatacttacagatgaattctttacgcgccgaggatacggccgtttattattgtgcccgtgaccgcggttaccgcggttactatgcgggtaactggtttgacccgtggggccagtggggtcaaggtaccctggtgaccgtttcttctggtggtagctctcgcagcagcagctctggcggcggtggcagcggcggtggcggcgagattgtgctgacccagagcccggcgacgttaagcttatctccgggcgaacgcgcgacgttatcttgccgcgcctctcagtctgtgtctagctcttatctggcctggtaccagcaaaaaccaggtcaggcgccgcgcctgttaatctacggcgcctcttctcgcgcgaccggcatcccggcgcgtttcagcggcagcggttctggcaccgatttcacgctgaccatctctcgcctggagccagaagactttgccgtgtattactgccaacaatctgatagcccgccaatcacgttcggccaaggcaccaaagttgagatcaaa

SEQ ID NO: 805 - DNA, 750 bp, synthetic construct
  source 1..750: mol_type = other DNA
caggtgcagttagttgaaagcggcggtggtgtggtgcaaccgggtcgtagcttacgtttatcttgcgcggcctctggctttacctttagcagctatgcgatgcattgggtgcgtcaggcgccaggtaagggcttagagtgggtggcggttatctcttatgacggtagcaacaagtactacgccgatagcgttaaaggccgcttcacgattagccgcgacaacagcaaaaataccttatacttacagatgaattctttacgcgccgaggatacggccgtttattattgtgcccgtgaccgcatcgttccagccggtagcgattactggggtcagtggggtcagggcaccttagttacggtgagcagcggcggttcttctcgctctagctcttctggcggcggcggtagcggcggtggcggcgaaatcgtgctgacgcagagcccggcgaccctgagcctgtctccaggcgagcgcgcgaccctgtcttgccgcgcctctcagtctgtttctagctcttatttagcgtggtaccagcagaagccaggccaagcgccacgcctgctgatttacggcgcctcttctcgtgccacgggtatcccggcgcgtttcagcggcagcggtagcggcaccgacttcaccctgaccatctctcgtctggagccagaggatttcgccgtgtactattgtgcgagctacaccccatctcgcaatacctatgttttcggtcaaggcacgaaagtggaaatcaaa

SEQ ID NO: 806 - DNA, 744 bp, synthetic construct
  source 1..744: mol_type = other DNA
caggtgcagttagttgaaagcggcggtggtgtggtgcaaccgggtcgtagcttacgtttatcttgcgcggcctctggctttacctttagcagctatgcgatgcattgggtgcgtcaggcgccaggtaagggcttagagtgggtggcggttatctcttatgacggtagcaacaagtactacgccgatagcgttaaaggccgcttcacgattagccgcgacaacagcaaaaataccttatacttacagatgaattctttacgcgccgaggatacggccgtttattattgtgcccgtgaccgcatcgttccagccggtagcgattactggggtcagtggggtcagggcaccttagttacggtgagcagcggcggttcttctcgctctagctcttctggcggcggcggtagcggcggtggcggcgaaatcgtgctgacgcagagcccggcgaccctgagcctgtctccaggcgagcgcgcgaccctgtcttgccgcgcctctcagtctgtttctagctcttatttagcgtggtaccagcagaagccaggccaagcgccacgcctgctgatttacggcgcctcttctcgtgccacgggtatcccggcgcgtttcagcggcagcggtagcggcaccgacttcaccctgaccatctctcgtctggagccagaggatttcgccgtgtactattgtcaggcgtgggacagccgcacggttgtgtttggccaaggtacgaaggtggagattaaa

SEQ ID NO: 807 - DNA, 744 bp, synthetic construct
  source 1..744: mol_type = other DNA
caggtgcagttagttgaaagcggcggtggtgtggtgcaaccgggtcgtagcttacgtttatcttgcgcggcctctggctttacctttagcagctatgcgatgcattgggtgcgtcaggcgccaggtaagggcttagagtgggtggcggttatctcttatgacggtagcaacaagtactacgccgatagcgttaaaggccgcttcacgattagccgcgacaacagcaaaaataccttatacttacagatgaattctttacgcgccgaggatacggccgtttattattgtgcccgtgaccgcatcgttccagccggtagcgattactggggtcagtggggtcagggcaccttagttacggtgagcagcggcggttcttctcgctctagctcttctggcggcggcggtagcggcggtggcggcgaaatcgtgctgacgcagagcccggcgaccctgagcctgtctccaggcgagcgcgcgaccctgtcttgccgcgcctctcagtctgtttctagctcttatttagcgtggtaccagcagaagccaggccaagcgccacgcctgctgatttacggcgcctcttctcgtgccacgggtatcccggcgcgtttcagcggcagcggtagcggcaccgacttcaccctgaccatctctcgtctggagccagaggatttcgccgtgtactattgtcaggcgtgggacagctctatctgggtttttggccagggtacgaaggttgaaatcaaa

SEQ ID NO: 808 - DNA, 744 bp, synthetic construct
  source 1..744: mol_type = other DNA
caggtgcagttagttgaaagcggcggtggtgtggtgcaaccgggtcgtagcttacgtttatcttgcgcggcctctggctttacctttagcagctatgcgatgcattgggtgcgtcaggcgccaggtaagggcttagagtgggtggcggttatctcttatgacggtagcaacaagtactacgccgatagcgttaaaggccgcttcacgattagccgcgacaacagcaaaaataccttatacttacagatgaattctttacgcgccgaggatacggccgtttattattgtgcccgtgaccgcatcgttccagccggtagcgattactggggtcagtggggtcagggcaccttagttacggtgagcagcggcggttcttctcgctctagctcttctggcggcggcggtagcggcggtggcggcgaaatcgtgctgacgcagagcccggcgaccctgagcctgtctccaggcgagcgcgcgaccctgtcttgccgcgcctctcagtctgtttctagctcttatttagcgtggtaccagcagaagccaggccaagcgccacgcctgctgatttacggcgcctcttctcgtgccacgggtatcccggcgcgtttcagcggcagcggtagcggcaccgacttcaccctgaccatctctcgtctggagccagaggatttcgccgtgtactattgtcaggcgtgggacagctctacggttgtgtttggccaaggtacgaaggtggagattaaa

SEQ ID NO: 809 - DNA, 744 bp, synthetic construct
  source 1..744: mol_type = other DNA
caggtgcagttagttgaaagcggcggtggtgtggtgcaaccgggtcgtagcttacgtttatcttgcgcggcctctggctttacctttagcagctatgcgatgcattgggtgcgtcaggcgccaggtaagggcttagagtgggtggcggttatctcttatgacggtagcaacaagtactacgccgatagcgttaaaggccgcttcacgattagccgcgacaacagcaaaaataccttatacttacagatgaattctttacgcgccgaggatacggccgtttattattgtgcccgtgaccgcatcgttccagccggtagcgattactggggtcagtggggtcagggcaccttagttacggtgagcagcggcggttcttctcgctctagctcttctggcggcggcggtagcggcggtggcggcgaaatcgtgctgacgcagagcccggcgaccctgagcctgtctccaggcgagcgcgcgaccctgtcttgccgcgcctctcagtctgtttctagctcttatttagcgtggtaccagcagaagccaggccaagcgccacgcctgctgatttacggcgcctcttctcgtgccacgggtatcccggcgcgtttcagcggcagcggtagcggcaccgacttcaccctgaccatctctcgtctggagccagaggatttcgccgtgtactattgtcagagctgggacagcttcggtcaagtgtttggccaaggtacgaaggtggagattaaa

SEQ ID NO: 810 - DNA, 747 bp, synthetic construct
  source 1..747: mol_type = other DNA
caggtgcagttagttgaaagcggcggtggtgtggtgcaaccgggtcgtagcttacgtttatcttgcgcggcctctggctttacctttagcagctatgcgatgcattgggtgcgtcaggcgccaggtaagggcttagagtgggtggcggttatctcttatgacggtagcaacaagtactacgccgatagcgttaaaggccgcttcacgattagccgcgacaacagcaaaaataccttatacttacagatgaattctttacgcgccgaggatacggccgtttattattgtgcccgtgaccgcatcgttccagccggtagcgattactggggtcagtggggtcagggcaccttagttacggtgagcagcggcggttcttctcgctctagctcttctggcggcggcggtagcggcggtggcggcgaaatcgtgctgacgcagagcccggcgaccctgagcctgtctccaggcgagcgcgcgaccctgtcttgccgcgcctctcagtctgtttctagctcttatttagcgtggtaccagcagaagccaggccaagcgccacgcctgctgatttacggcgcctcttctcgtgccacgggtatcccggcgcgtttcagcggcagcggtagcggcaccgacttcaccctgaccatctctcgtctggagccagaggatttcgccgtgtactattgtcagagctacgattctatgtctggttggatttttggccaaggtacgaaggtggagattaaa

SEQ ID NO: 811 - DNA, 744 bp, synthetic construct
  source 1..744: mol_type = other DNA
caggtgcagttagttgaaagcggcggtggtgtggtgcaaccgggtcgtagcttacgtttatcttgcgcggcctctggctttacctttagcagctatgcgatgcattgggtgcgtcaggcgccaggtaagggcttagagtgggtggcggttatctcttatgacggtagcaacaagtactacgccgatagcgttaaaggccgcttcacgattagccgcgacaacagcaaaaataccttatacttacagatgaattctttacgcgccgaggatacggccgtttattattgtgcccgtgaccgcatcgttccagccggtagcgattactggggtcagtggggtcagggcaccttagttacggtgagcagcggcggttcttctcgctctagctcttctggcggcggcggtagcggcggtggcggcgaaatcgtgctgacgcagagcccggcgaccctgagcctgtctccaggcgagcgcgcgaccctgtcttgccgcgcctctcagtctgtttctagctcttatttagcgtggtaccagcagaagccaggccaagcgccacgcctgctgatttacggcgcctcttctcgtgccacgggtatcccggcgcgtttcagcggcagcggtagcggcaccgacttcaccctgaccatctctcgtctggagccagaggatttcgccgtgtactattgtcagacctgggacagcttcggtttagtgtttggccaaggtacgaaggtggagattaaa

SEQ ID NO: 812 - DNA, 747 bp, synthetic construct
  source 1..747: mol_type = other DNA
caggtgcagttagttgaaagcggcggtggtgtggtgcaaccgggtcgtagcttacgtttatcttgcgcggcctctggctttacctttagcagctatgcgatgcattgggtgcgtcaggcgccaggtaagggcttagagtgggtggcggttatctcttatgacggtagcaacaagtactacgccgatagcgttaaaggccgcttcacgattagccgcgacaacagcaaaaataccttatacttacagatgaattctttacgcgccgaggatacggccgtttattattgtgcccgtgaccgcccatggatgtacccagacttatggggccagtggggtcaaggcacgctggtgaccgtttcttctggcggcagcagccgctcttcttcttctggcggtggtggcagcggcggtggcggcgagattgtgctgacgcagagcccagcgaccctgagcctgagcccgggcgagcgcgcgacgttaagctgccgtgccagccaatctgttagctcttcttacctggcctggtatcaacagaagccgggccaagccccgcgcctgttaatctatggcgcgtctagccgcgccacgggcatcccagcccgctttagcggctctggcagcggcacggattttaccttaacgattagccgtttagagccggaagacttcgccgtgtactactgccaagtgtgggacagcagctctgatcactgggttttcggccagggcacgaaggttgagattaaa

SEQ ID NO: 813 - DNA, 741 bp, synthetic construct
  source 1..741: mol_type = other DNA
caggtgcagttagttgaaagcggcggtggtgtggtgcaaccgggtcgtagcttacgtttatcttgcgcggcctctggctttacctttagcagctatgcgatgcattgggtgcgtcaggcgccaggtaagggcttagagtgggtggcggttatctcttatgacggtagcaacaagtactacgccgatagcgttaaaggccgcttcacgattagccgcgacaacagcaaaaataccttatacttacagatgaattctttacgcgccgaggatacggccgtttattattgtgcccgtgaccgccgcgacttaacgttagattattggggtcaatggggccaaggcaccctggttacggttagcagcggcggctcttctcgctcttctagctctggtggcggcggctctggcggcggtggcgaaattgttctgacccaaagcccggcgaccctgagcctgagcccaggtgaacgcgccaccctgagctgtcgtgcctctcaaagcgtttcttctagctacctggcctggtatcaacagaaaccaggtcaggccccgcgcttactgatttatggtgcgtcttctcgcgcgacgggtatcccagcgcgtttttctggcagcggctctggcaccgatttcacgctgaccatttctcgcctggaaccagaggactttgccgtttattactgccaagcgtgggattctctgacggccgtttttggccagggtacgaaggttgaaatcaaa

SEQ ID NO: 814 - DNA, 747 bp, synthetic construct
  source 1..747: mol_type = other DNA
caggtgcagttagttgaaagcggcggtggtgtggtgcaaccgggtcgtagcttacgtttatcttgcgcggcctctggctttacctttagcagctatgcgatgcattgggtgcgtcaggcgccaggtaagggcttagagtgggtggcggttatctcttatgacggtagcaacaagtactacgccgatagcgttaaaggccgcttcacgattagccgcgacaacagcaaaaataccttatacttacagatgaattctttacgcgccgaggatacggccgtttattattgtgcccgtgaccgcacgggtatcacgggttttgattactggggtcagtggggtcagggcaccttagttacggtgagcagcggcggttcttctcgctctagctcttctggcggcggcggtagcggcggtggcggcgaaatcgtgctgacgcagagcccggcgaccctgagcctgtctccaggcgagcgcgcgaccctgtcttgccgcgcctctcagtctgtttctagctcttatttagcgtggtaccagcagaagccaggccaagcgccacgcctgctgatttacggcgcctcttctcgtgccacgggtatcccggcgcgtttcagcggcagcggtagcggcaccgacttcaccctgaccatctctcgtctggagccagaggatttcgccgtgtactattgtcaggcgtgggacagctctgccacggtggtgtttggtcaaggtacgaaagttgaaattaaa

SEQ ID NO: 815 - DNA, 771 bp, synthetic construct
  source 1..771: mol_type = other DNA
caggtgcagttagttgaaagcggcggtggtgtggtgcaaccgggtcgtagcttacgtttatcttgcgcggcctctggctttacctttagcagctatgcgatgcattgggtgcgtcaggcgccaggtaagggcttagagtgggtggcggttatctcttatgacggtagcaacaagtactacgccgatagcgttaaaggccgcttcacgattagccgcgacaacagcaaaaataccttatacttacagatgaattctttacgcgccgaggatacggccgtttattattgtgcccgtgactctggtggttaccgcacgagcggcccatactttcaaggctatgcgatggacgtttggggtcagtggggccagggcacgttagttacggttagctctggtggcagcagccgcagcagctctagcggcggcggtggcagcggtggcggcggcgaaattgtgctgacccaatctccggccacgctgagcctgtctccgggtgagcgcgcgacgttatcttgccgcgcgtctcagtctgtgagctcttcttatttagcgtggtaccaacagaaaccgggtcaggccccacgcctgttaatctacggtgcgagcagccgcgcgaccggcatcccggcgcgtttctctggcagcggctctggtaccgatttcacgttaaccatctctcgtttagaaccagaagatttcgcggtttactactgccagcagtcttactctccaccgccaacctttggccaaggtacgaaagttgagattaaa

SEQ ID NO: 816 - DNA, 777 bp, synthetic construct
  source 1..777: mol_type = other DNA
caggtgcagttagttgaaagcggcggtggtgtggtgcaaccgggtcgtagcttacgtttatcttgcgcggcctctggctttacctttagcagctatgcgatgcattgggtgcgtcaggcgccaggtaagggcttagagtgggtggcggttatctcttatgacggtagcaacaagtactacgccgatagcgttaaaggccgcttcacgattagccgcgacaacagcaaaaataccttatacttacagatgaattctttacgcgccgaggatacggccgtttattattgtgcccgtgactctggtggttaccgcacgagcggcccatactttcaaggctatgcgatggacgtttggggtcagtggggccagggcacgttagttacggttagctctggtggcagcagccgcagcagctctagcggcggcggtggcagcggtggcggcggcgaaattgtgctgacccaatctccggccacgctgagcctgtctccgggtgagcgcgcgacgttatcttgccgcgcgtctcagtctgtgagctcttcttatttagcgtggtaccaacagaaaccgggtcaggccccacgcctgttaatctacggtgcgagcagccgcgcgaccggcatcccggcgcgtttctctggcagcggctctggtaccgatttcacgttaaccatctctcgtttagaaccagaagatttcgcggtttactactgccagcagtacaacaactggccaccgccacgtacctttggtcaaggtaccaaggttgaaatcaaa

SEQ ID NO: 817 - DNA, 747 bp, synthetic construct
  source 1..747: mol_type = other DNA
caggtgcagttagttgaaagcggcggtggtgtggtgcaaccgggtcgtagcttacgtttatcttgcgcggcctctggctttacctttagcagctatgcgatgcattgggtgcgtcaggcgccaggtaagggcttagagtgggtggcggttatctcttatgacggtagcaacaagtactacgccgatagcgttaaaggccgcttcacgattagccgcgacaacagcaaaaataccttatacttacagatgaattctttacgcgccgaggatacggccgtttattattgtgcccgtgactctcactactacggtatggacgtgtggggccaatggggtcagggtaccctggtgacggtttctagcggcggcagctctcgctcttcttctagcggtggtggcggcagcggtggcggcggtgaaattgtgttaacccagtctccggcgaccctgagcctgagcccgggtgagcgtgccacgctgagctgccgcgcgtctcaatctgtgtcttcttcttatttagcgtggtaccagcaaaaaccgggtcaagcgccacgtttattaatttatggcgccagctctcgcgccaccggtatcccagcccgttttagcggtagcggcagcggtaccgattttacgttaaccattagccgcttagaaccggaggacttcgcggtttactattgtagctcttttaccccaagctctacgttcgtggtgtttggtcaaggtacgaaagttgaaattaaa

SEQ ID NO: 818 - DNA, 738 bp, synthetic construct
  source 1..738: mol_type = other DNA
caggtgcagttagttgaaagcggcggtggtgtggtgcaaccgggtcgtagcttacgtttatcttgcgcggcctctggctttacctttagcagctatgcgatgcattgggtgcgtcaggcgccaggtaagggcttagagtgggtggcggttatctcttatgacggtagcaacaagtactacgccgatagcgttaaaggccgcttcacgattagccgcgacaacagcaaaaataccttatacttacagatgaattctttacgcgccgaggatacggccgtttattattgtgcccgtgactctaagggttacttagactattggggccaatggggtcagggtaccctggtgacggtttctagcggcggcagctctcgctcttcttctagcggtggtggcggcagcggtggcggcggtgaaattgtgttaacccagtctccggcgaccctgagcctgagcccgggtgagcgtgccacgctgagctgccgcgcgtctcaatctgtgtcttcttcttatttagcgtggtaccagcaaaaaccgggtcaagcgccacgtttattaatttatggcgccagctctcgcgccaccggtatcccagcccgttttagcggtagcggcagcggtaccgattttacgttaaccattagccgcttagaaccggaggacttcgcggtttactattgtcagcaagaagattctccgccaatcacgtttggccagggtacgaaggttgaaatcaaa

SEQ ID NO: 819 - DNA, 741 bp, synthetic construct
  source 1..741: mol_type = other DNA
caggtgcagttagttgaaagcggcggtggtgtggtgcaaccgggtcgtagcttacgtttatcttgcgcggcctctggctttacctttagcagctatgcgatgcattgggtgcgtcaggcgccaggtaagggcttagagtgggtggcggttatctcttatgacggtagcaacaagtactacgccgatagcgttaaaggccgcttcacgattagccgcgacaacagcaaaaataccttatacttacagatgaattctttacgcgccgaggatacggccgtttattattgtgcccgtgacgttggtgttggtgccacggattattggggtcaatggggccaaggcaccctggttacggttagcagcggcggctcttctcgctcttctagctctggtggcggcggctctggcggcggtggcgaaattgttctgacccaaagcccggcgaccctgagcctgagcccaggtgaacgcgccaccctgagctgtcgtgcctctcaaagcgtttcttctagctacctggcctggtatcaacagaaaccaggtcaggccccgcgcttactgatttatggtgcgtcttctcgcgcgacgggtatcccagcgcgtttttctggcagcggctctggcaccgatttcacgctgaccatttctcgcctggaaccagaggactttgccgtttattactgccaacagagctacagcccaccaatcacctttggccaaggtacgaaggtggagattaaa

SEQ ID NO: 820 - DNA, 741 bp, synthetic construct
  source 1..741: mol_type = other DNA
caggtgcagttagttgaaagcggcggtggtgtggtgcaaccgggtcgtagcttacgtttatcttgcgcggcctctggctttacctttagcagctatgcgatgcattgggtgcgtcaggcgccaggtaagggcttagagtgggtggcggttatctcttatgacggtagcaacaagtactacgccgatagcgttaaaggccgcttcacgattagccgcgacaacagcaaaaataccttatacttacagatgaattctttacgcgccgaggatacggccgtttattattgtgcccgtgaggccggttactacggtatggacgtgtggggccaatggggtcagggtaccctggtgacggtttctagcggcggcagctctcgctcttcttctagcggtggtggcggcagcggtggcggcggtgaaattgtgttaacccagtctccggcgaccctgagcctgagcccgggtgagcgtgccacgctgagctgccgcgcgtctcaatctgtgtcttcttcttatttagcgtggtaccagcaaaaaccgggtcaagcgccacgtttattaatttatggcgccagctctcgcgccaccggtatcccagcccgttttagcggtagcggcagcggtaccgattttacgttaaccattagccgcttagaaccggaggacttcgcggtttactattgtcagcaatatgattctccgccattaacgtttggccagggtacgaaggttgaaatcaaa

SEQ ID NO: 821 - DNA, 765 bp, synthetic construct
  source 1..765: mol_type = other DNA
caggtgcagttagttgaaagcggcggtggtgtggtgcaaccgggtcgtagcttacgtttatcttgcgcggcctctggctttacctttagcagctatgcgatgcattgggtgcgtcaggcgccaggtaagggcttagagtgggtggcggttatctcttatgacggtagcaacaagtactacgccgatagcgttaaaggccgcttcacgattagccgcgacaacagcaaaaataccttatacttacagatgaattctttacgcgccgaggatacggccgtttattattgtgcccgtgagggtgccacgggtacgttacagggcgccgcccagtacggcatggatgtgtggggtcaatggggtcagggcaccctggttacggtttcttctggcggttctagccgtagctctagcagcggtggcggcggctctggcggcggtggcgaaattgtgctgacccagagcccagccaccttatctctgagcccgggtgaacgcgccacgctgtcttgtcgcgcgtctcagtctgtgtctagcagctacttagcgtggtaccagcaaaagccgggccaggccccgcgcttattaatttacggtgcctctagccgtgcgacgggcattccggcccgttttagcggttctggcagcggcacggactttaccttaacgatcagccgcttagaaccagaagactttgcggtttattactgtcaacagtataataacccaccagttaccttcggccagggcacgaaggttgaaatcaaa

SEQ ID NO: 822 - DNA, 747 bp, synthetic construct
  source 1..747: mol_type = other DNA
caggtgcagttagttgaaagcggcggtggtgtggtgcaaccgggtcgtagcttacgtttatcttgcgcggcctctggctttacctttagcagctatgcgatgcattgggtgcgtcaggcgccaggtaagggcttagagtgggtggcggttatctcttatgacggtagcaacaagtactacgccgatagcgttaaaggccgcttcacgattagccgcgacaacagcaaaaataccttatacttacagatgaattctttacgcgccgaggatacggccgtttattattgtgcccgtgagatcggtaacgtttactacggctttgactactggggccaatggggccagggcacgttagttaccgtgagcagcggtggttcttctcgcagctcttctagcggcggcggtggcagcggtggcggcggcgagattgtgttaacccagagcccggcgaccctgagcttatctccgggtgagcgtgcgaccttaagctgtcgcgccagccaatctgttagctctagctacctggcctggtatcagcaaaagccgggtcaggccccacgtctgctgatctatggtgcctctagccgcgccacgggtattccggcgcgctttagcggctctggcagcggcacggactttaccctgacgatcagccgtttagagccagaagacttcgcggtttattactgccagcaaagcgactctccaccgattaccttcggtcaaggtaccaaggtggaaattaaa

SEQ ID NO: 823 - DNA, 765 bp, synthetic construct
  source 1..765: mol_type = other DNA
caggtgcagttagttgaaagcggcggtggtgtggtgcaaccgggtcgtagcttacgtttatcttgcgcggcctctggctttacctttagcagctatgcgatgcattgggtgcgtcaggcgccaggtaagggcttagagtgggtggcggttatctcttatgacggtagcaacaagtactacgccgatagcgttaaaggccgcttcacgattagccgcgacaacagcaaaaataccttatacttacagatgaattctttacgcgccgaggatacggccgtttattattgtgcccgtgagcgcttccaaacgatctcttataccacgggttttgacatttggggccagtggggtcaaggtaccctggtgaccgtttcttctggtggtagctctcgcagcagcagctctggcggcggtggcagcggcggtggcggcgagattgtgctgacccagagcccggcgacgttaagcttatctccgggcgaacgcgcgacgttatcttgccgcgcctctcagtctgtgtctagctcttatctggcctggtaccagcaaaaaccaggtcaggcgccgcgcctgttaatctacggcgcctcttctcgcgcgaccggcatcccggcgcgtttcagcggcagcggttctggcaccgatttcacgctgaccatctctcgcctggagccagaagactttgccgtgtattactgcggtacgtgggacagccgtctgttatctggtggtatgtttggtcagggcaccaaggttgagattaaa

SEQ ID NO: 824 - DNA, 765 bp, synthetic construct
  source 1..765: mol_type = other DNA
caggtgcagttagttgaaagcggcggtggtgtggtgcaaccgggtcgtagcttacgtttatcttgcgcggcctctggctttacctttagcagctatgcgatgcattgggtgcgtcaggcgccaggtaagggcttagagtgggtggcggttatctcttatgacggtagcaacaagtactacgccgatagcgttaaaggccgcttcacgattagccgcgacaacagcaaaaataccttatacttacagatgaattctttacgcgccgaggatacggccgtttattattgtgcccgtgagcgcttccaaacgatctcttataccacgggttttgacatttggggccagtggggtcaaggtaccctggtgaccgtttcttctggtggtagctctcgcagcagcagctctggcggcggtggcagcggcggtggcggcgagattgtgctgacccagagcccggcgacgttaagcttatctccgggcgaacgcgcgacgttatcttgccgcgcctctcagtctgtgtctagctcttatctggcctggtaccagcaaaaaccaggtcaggcgccgcgcctgttaatctacggcgcctcttctcgcgcgaccggcatcccggcgcgtttcagcggcagcggttctggcaccgatttcacgctgaccatctctcgcctggagccagaagactttgccgtgtattactgcggtacgtgggacagcagcctgttatctgcctgggtttttggtcagggcaccaaggttgagattaaa

SEQ ID NO: 825 - DNA, 756 bp, synthetic construct
  source 1..756: mol_type = other DNA
caggtgcagttagttgaaagcggcggtggtgtggtgcaaccgggtcgtagcttacgtttatcttgcgcggcctctggctttacctttagcagctatgcgatgcattgggtgcgtcaggcgccaggtaagggcttagagtgggtggcggttatctcttatgacggtagcaacaagtactacgccgatagcgttaaaggccgcttcacgattagccgcgacaacagcaaaaataccttatacttacagatgaattctttacgcgccgaggatacggccgtttattattgtgcccgtgagcgcttccaaacgatctcttataccacgggttttgacatttggggccagtggggtcaaggtaccctggtgaccgtttcttctggtggtagctctcgcagcagcagctctggcggcggtggcagcggcggtggcggcgagattgtgctgacccagagcccggcgacgttaagcttatctccgggcgaacgcgcgacgttatcttgccgcgcctctcagtctgtgtctagctcttatctggcctggtaccagcaaaaaccaggtcaggcgccgcgcctgttaatctacggcgcctcttctcgcgcgaccggcatcccggcgcgtttcagcggcagcggttctggcaccgatttcacgctgaccatctctcgcctggagccagaagactttgccgtgtattactgccaagcctgggacagccgtaccggtgttttcggtcagggtaccaaagtggagatcaaa

SEQ ID NO: 826 - DNA, 756 bp, synthetic construct
  source 1..756: mol_type = other DNA
caggtgcagttagttgaaagcggcggtggtgtggtgcaaccgggtcgtagcttacgtttatcttgcgcggcctctggctttacctttagcagctatgcgatgcattgggtgcgtcaggcgccaggtaagggcttagagtgggtggcggttatctcttatgacggtagcaacaagtactacgccgatagcgttaaaggccgcttcacgattagccgcgacaacagcaaaaataccttatacttacagatgaattctttacgcgccgaggatacggccgtttattattgtgcccgtgagcgcttccaaacgatctcttataccacgggttttgacatttggggccagtggggtcaaggtaccctggtgaccgtttcttctggtggtagctctcgcagcagcagctctggcggcggtggcagcggcggtggcggcgagattgtgctgacccagagcccggcgacgttaagcttatctccgggcgaacgcgcgacgttatcttgccgcgcctctcagtctgtgtctagctcttatctggcctggtaccagcaaaaaccaggtcaggcgccgcgcctgttaatctacggcgcctcttctcgcgcgaccggcatcccggcgcgtttcagcggcagcggttctggcaccgatttcacgctgaccatctctcgcctggagccagaagactttgccgtgtattactgccaagcctgggacagcagcaccgttgttttcggtcagggtaccaaagtggagatcaaa

SEQ ID NO: 827 - DNA, 756 bp, synthetic construct
  source 1..756: mol_type = other DNA
caggtgcagttagttgaaagcggcggtggtgtggtgcaaccgggtcgtagcttacgtttatcttgcgcggcctctggctttacctttagcagctatgcgatgcattgggtgcgtcaggcgccaggtaagggcttagagtgggtggcggttatctcttatgacggtagcaacaagtactacgccgatagcgttaaaggccgcttcacgattagccgcgacaacagcaaaaataccttatacttacagatgaattctttacgcgccgaggatacggccgtttattattgtgcccgtgagcgcttccaaacgatctcttataccacgggttttgacatttggggccagtggggtcaaggtaccctggtgaccgtttcttctggtggtagctctcgcagcagcagctctggcggcggtggcagcggcggtggcggcgagattgtgctgacccagagcccggcgacgttaagcttatctccgggcgaacgcgcgacgttatcttgccgcgcctctcagtctgtgtctagctcttatctggcctggtaccagcaaaaaccaggtcaggcgccgcgcctgttaatctacggcgcctcttctcgcgcgaccggcatcccggcgcgtttcagcggcagcggttctggcaccgatttcacgctgaccatctctcgcctggagccagaagactttgccgtgtattactgccaacaatctgatagcccgccattaacgttcggccaaggcaccaaagttgagatcaaa

SEQ ID NO: 828 - DNA, 768 bp, synthetic construct
  source 1..768: mol_type = other DNA
caggtgcagttagttgaaagcggcggtggtgtggtgcaaccgggtcgtagcttacgtttatcttgcgcggcctctggctttacctttagcagctatgcgatgcattgggtgcgtcaggcgccaggtaagggcttagagtgggtggcggttatctcttatgacggtagcaacaagtactacgccgatagcgttaaaggccgcttcacgattagccgcgacaacagcaaaaataccttatacttacagatgaattctttacgcgccgaggatacggccgtttattattgtgcccgtgagcgcttccaaacgatctcttataccacgggttttgacatttggggccagtggggtcaaggtaccctggtgaccgtttcttctggtggtagctctcgcagcagcagctctggcggcggtggcagcggcggtggcggcgagattgtgctgacccagagcccggcgacgttaagcttatctccgggcgaacgcgcgacgttatcttgccgcgcctctcagtctgtgtctagctcttatctggcctggtaccagcaaaaaccaggtcaggcgccgcgcctgttaatctacggcgcctcttctcgcgcgaccggcatcccggcgcgtttcagcggcagcggttctggcaccgatttcacgctgaccatctctcgcctggagccagaagactttgccgtgtattactgccaagtttgggacagcagcagcgaccacgaccacgtggtttttggccagggtacgaaggtggagatcaaa

SEQ ID NO: 829 - DNA, 765 bp, synthetic construct
  source 1..765: mol_type = other DNA
caggtgcagttagttgaaagcggcggtggtgtggtgcaaccgggtcgtagcttacgtttatcttgcgcggcctctggctttacctttagcagctatgcgatgcattgggtgcgtcaggcgccaggtaagggcttagagtgggtggcggttatctcttatgacggtagcaacaagtactacgccgatagcgttaaaggccgcttcacgattagccgcgacaacagcaaaaataccttatacttacagatgaattctttacgcgccgaggatacggccgtttattattgtgcccgtgagcgcggtgttacgcgcccattttattactctggctacggcatggatgtgtggggtcaatggggtcagggcaccctggttacggtttcttctggcggttctagccgtagctctagcagcggtggcggcggctctggcggcggtggcgaaattgtgctgacccagagcccagccaccttatctctgagcccgggtgaacgcgccacgctgtcttgtcgcgcgtctcagtctgtgtctagcagctacttagcgtggtaccagcaaaagccgggccaggccccgcgcttattaatttacggtgcctctagccgtgcgacgggcattccggcccgttttagcggttctggcagcggcacggactttaccttaacgatcagccgcttagaaccagaagactttgcggtttattactgtcaacagtatgcgtctccaccagttagcttcggccagggcacgaaggttgaaatcaaa

SEQ ID NO: 830 - DNA, 765 bp, synthetic construct
  source 1..765: mol_type = other DNA
caggtgcagttagttgaaagcggcggtggtgtggtgcaaccgggtcgtagcttacgtttatcttgcgcggcctctggctttacctttagcagctatgcgatgcattgggtgcgtcaggcgccaggtaagggcttagagtgggtggcggttatctcttatgacggtagcaacaagtactacgccgatagcgttaaaggccgcttcacgattagccgcgacaacagcaaaaataccttatacttacagatgaattctttacgcgccgaggatacggccgtttattattgtgcccgtgagcgctacaactactctcgcggcaaattaggtattccagcgatggatatttggggtcaatggggtcagggcaccctggttacggtttcttctggcggttctagccgtagctctagcagcggtggcggcggctctggcggcggtggcgaaattgtgctgacccagagcccagccaccttatctctgagcccgggtgaacgcgccacgctgtcttgtcgcgcgtctcagtctgtgtctagcagctacttagcgtggtaccagcaaaagccgggccaggccccgcgcttattaatttacggtgcctctagccgtgcgacgggcattccggcccgttttagcggttctggcagcggcacggactttaccttaacgatcagccgcttagaaccagaagactttgcggtttattactgtcaacagtatgataacttaccaatcaccttcggccagggcacgaaggttgaaatcaaa

SEQ ID NO: 831 - DNA, 747 bp, synthetic construct
  source 1..747: mol_type = other DNA
caggtgcagttagttgaaagcggcggtggtgtggtgcaaccgggtcgtagcttacgtttatcttgcgcggcctctggctttacctttagcagctatgcgatgcattgggtgcgtcaggcgccaggtaagggcttagagtgggtggcggttatctcttatgacggtagcaacaagtactacgccgatagcgttaaaggccgcttcacgattagccgcgacaacagcaaaaataccttatacttacagatgaattctttacgcgccgaggatacggccgtttattattgtgcccgtgagtggggtggttcttggttcggtatggacccgtggggccaatggggtcagggtaccctggtgacggtttctagcggcggcagctctcgctcttcttctagcggtggtggcggcagcggtggcggcggtgaaattgtgttaacccagtctccggcgaccctgagcctgagcccgggtgagcgtgccacgctgagctgccgcgcgtctcaatctgtgtcttcttcttatttagcgtggtaccagcaaaaaccgggtcaagcgccacgtttattaatttatggcgccagctctcgcgccaccggtatcccagcccgttttagcggtagcggcagcggtaccgattttacgttaaccattagccgcttagaaccggaggacttcgcggtttactattgtcagcaagcgtattctccgccagttacgtttggccagggtacgaaggttgaaatcaaa

SEQ ID NO: 832 - DNA, 744 bp, synthetic construct
  source 1..744: mol_type = other DNA
caggtgcagttagttgaaagcggcggtggtgtggtgcaaccgggtcgtagcttacgtttatcttgcgcggcctctggctttacctttagcagctatgcgatgcattgggtgcgtcaggcgccaggtaagggcttagagtgggtggcggttatctcttatgacggtagcaacaagtactacgccgatagcgttaaaggccgcttcacgattagccgcgacaacagcaaaaataccttatacttacagatgaattctttacgcgccgaggatacggccgtttattattgtgcccgtttccgctcttctaaccgcggttttgatgtttggggtcagtggggtcagggcaccttagttacggtgagcagcggcggttcttctcgctctagctcttctggcggcggcggtagcggcggtggcggcgaaatcgtgctgacgcagagcccggcgaccctgagcctgtctccaggcgagcgcgcgaccctgtcttgccgcgcctctcagtctgtttctagctcttatttagcgtggtaccagcagaagccaggccaagcgccacgcctgctgatttacggcgcctcttctcgtgccacgggtatcccggcgcgtttcagcggcagcggtagcggcaccgacttcaccctgaccatctctcgtctggagccagaggatttcgccgtgtactattgtatgcagggcacgcattggccaccaacgtttggccagggtacgaaggttgaaatcaaa

SEQ ID NO: 833 - DNA, 765 bp, synthetic construct
  source 1..765: mol_type = other DNA
caggtgcagttagttgaaagcggcggtggtgtggtgcaaccgggtcgtagcttacgtttatcttgcgcggcctctggctttacctttagcagctatgcgatgcattgggtgcgtcaggcgccaggtaagggcttagagtgggtggcggttatctcttatgacggtagcaacaagtactacgccgatagcgttaaaggccgcttcacgattagccgcgacaacagcaaaaataccttatacttacagatgaattctttacgcgccgaggatacggccgtttattattgtgcccgtggtggttaccgcgactggttaaagcagagctactactttgactattggggccagtggggtcaaggtaccctggtgaccgtttcttctggtggtagctctcgcagcagcagctctggcggcggtggcagcggcggtggcggcgagattgtgctgacccagagcccggcgacgttaagcttatctccgggcgaacgcgcgacgttatcttgccgcgcctctcagtctgtgtctagctcttatctggcctggtaccagcaaaaaccaggtcaggcgccgcgcctgttaatctacggcgcctcttctcgcgcgaccggcatcccggcgcgtttcagcggcagcggttctggcaccgatttcacgctgaccatctctcgcctggagccagaagactttgccgtgtattactgccaaacgtgggacagccgtctgaactctgccgtttttggtcagggcaccaaggttgagattaaa

SEQ ID NO: 834 - DNA, 741 bp, synthetic construct
  source 1..741: mol_type = other DNA
caggtgcagttagttgaaagcggcggtggtgtggtgcaaccgggtcgtagcttacgtttatcttgcgcggcctctggctttacctttagcagctatgcgatgcattgggtgcgtcaggcgccaggtaagggcttagagtgggtggcggttatctcttatgacggtagcaacaagtactacgccgatagcgttaaaggccgcttcacgattagccgcgacaacagcaaaaataccttatacttacagatgaattctttacgcgccgaggatacggccgtttattattgtgcccgtggtaaggcctggggttggttcgacccatggggccagtggggtcaaggcacgctggtgaccgtttcttctggcggcagcagccgctcttcttcttctggcggtggtggcagcggcggtggcggcgagattgtgctgacgcagagcccagcgaccctgagcctgagcccgggcgagcgcgcgacgttaagctgccgtgccagccaatctgttagctcttcttacctggcctggtatcaacagaagccgggccaagccccgcgcctgttaatctatggcgcgtctagccgcgccacgggcatcccagcccgctttagcggctctggcagcggcacggattttaccttaacgattagccgtttagagccggaagacttcgccgtgtactactgccaacagtacgatagcacgccgtacacgttcggccagggcacgaaggttgagattaaa

SEQ ID NO: 835 - DNA, 741 bp, synthetic construct
  source 1..741: mol_type = other DNA
caggtgcagttagttgaaagcggcggtggtgtggtgcaaccgggtcgtagcttacgtttatcttgcgcggcctctggctttacctttagcagctatgcgatgcattgggtgcgtcaggcgccaggtaagggcttagagtgggtggcggttatctcttatgacggtagcaacaagtactacgccgatagcgttaaaggccgcttcacgattagccgcgacaacagcaaaaataccttatacttacagatgaattctttacgcgccgaggatacggccgtttattattgtgcccgtggtaaggcctggggttggttcgacccatggggccagtggggtcaaggcacgctggtgaccgtttcttctggcggcagcagccgctcttcttcttctggcggtggtggcagcggcggtggcggcgagattgtgctgacgcagagcccagcgaccctgagcctgagcccgggcgagcgcgcgacgttaagctgccgtgccagccaatctgttagctcttcttacctggcctggtatcaacagaagccgggccaagccccgcgcctgttaatctatggcgcgtctagccgcgccacgggcatcccagcccgctttagcggctctggcagcggcacggattttaccttaacgattagccgtttagagccggaagacttcgccgtgtactactgccaacagtacaataattggccatatacgttcggtcagggcaccaaggttgagatcaaa

SEQ ID NO: 836 - DNA, 741 bp, synthetic construct
  source 1..741: mol_type = other DNA
caggtgcagttagttgaaagcggcggtggtgtggtgcaaccgggtcgtagcttacgtttatcttgcgcggcctctggctttacctttagcagctatgcgatgcattgggtgcgtcaggcgccaggtaagggcttagagtgggtggcggttatctcttatgacggtagcaacaagtactacgccgatagcgttaaaggccgcttcacgattagccgcgacaacagcaaaaataccttatacttacagatgaattctttacgcgccgaggatacggccgtttattattgtgcccgtggtaagtctttaggtgccttagattattggggtcaatggggccaaggcaccctggttacggttagcagcggcggctcttctcgctcttctagctctggtggcggcggctctggcggcggtggcgaaattgttctgacccaaagcccggcgaccctgagcctgagcccaggtgaacgcgccaccctgagctgtcgtgcctctcaaagcgtttcttctagctacctggcctggtatcaacagaaaccaggtcaggccccgcgcttactgatttatggtgcgtcttctcgcgcgacgggtatcccagcgcgtttttctggcagcggctctggcaccgatttcacgctgaccatttctcgcctggaaccagaggactttgccgtttattactgccaacagagctacagcccaccaatcacctttggccaaggtacgaaggtggagattaaa

SEQ ID NO: 837 - DNA, 765 bp, synthetic construct
  source 1..765: mol_type = other DNA
caggtgcagttagttgaaagcggcggtggtgtggtgcaaccgggtcgtagcttacgtttatcttgcgcggcctctggctttacctttagcagctatgcgatgcattgggtgcgtcaggcgccaggtaagggcttagagtgggtggcggttatctcttatgacggtagcaacaagtactacgccgatagcgttaaaggccgcttcacgattagccgcgacaacagcaaaaataccttatacttacagatgaattctttacgcgccgaggatacggccgtttattattgtgcccgtggtttacgcggttaccgcggtggcggcacgtacgatgcctttgatgtgtggggtcaatggggtcagggcaccctggttacggtttcttctggcggttctagccgtagctctagcagcggtggcggcggctctggcggcggtggcgaaattgtgctgacccagagcccagccaccttatctctgagcccgggtgaacgcgccacgctgtcttgtcgcgcgtctcagtctgtgtctagcagctacttagcgtggtaccagcaaaagccgggccaggccccgcgcttattaatttacggtgcctctagccgtgcgacgggcattccggcccgttttagcggttctggcagcggcacggactttaccttaacgatcagccgcttagaaccagaagactttgcggtttattactgtcaagcgtgggatagctcttctgcctacgtgttcggccagggcacgaaggttgaaatcaaa

SEQ ID NO: 838 - DNA, 756 bp, synthetic construct
  source 1..756: mol_type = other DNA
caggtgcagttagttgaaagcggcggtggtgtggtgcaaccgggtcgtagcttacgtttatcttgcgcggcctctggctttacctttagcagctatgcgatgcattgggtgcgtcaggcgccaggtaagggcttagagtgggtggcggttatctcttatgacggtagcaacaagtactacgccgatagcgttaaaggccgcttcacgattagccgcgacaacagcaaaaataccttatacttacagatgaattctttacgcgccgaggatacggccgtttattattgtgcccgtggtccataccgccgctcttactttagctacggtatggatgtttggggccagtggggccaaggtacgctggtgaccgtgtcttctggtggttctagccgctctagcagcagcggtggcggcggtagcggcggcggtggcgaaatcgtgctgacccagagcccggcgaccttatctctgtctccaggcgaacgtgccaccttatcttgtcgtgcctctcaaagcgttagctctagctacctggcgtggtaccaacagaagccgggtcaagcgccgcgtttactgatctacggtgcgtcttctcgcgccaccggcattccagcgcgtttttctggcagcggctctggtaccgattttacgttaaccatttctcgcttagaaccagaggatttcgcggtttattattgtcagcaagacaacaatctgccgatcacgttcggtcagggtaccaaagtggagatcaaa

SEQ ID NO: 839 - DNA, 756 bp, synthetic construct
  source 1..756: mol_type = other DNA
caggtgcagttagttgaaagcggcggtggtgtggtgcaaccgggtcgtagcttacgtttatcttgcgcggcctctggctttacctttagcagctatgcgatgcattgggtgcgtcaggcgccaggtaagggcttagagtgggtggcggttatctcttatgacggtagcaacaagtactacgccgatagcgttaaaggccgcttcacgattagccgcgacaacagcaaaaataccttatacttacagatgaattctttacgcgccgaggatacggccgtttattattgtgcccgtggtccataccgccgctcttactttagctacggtatggatgtttggggccagtggggccaaggtacgctggtgaccgtgtcttctggtggttctagccgctctagcagcagcggtggcggcggtagcggcggcggtggcgaaatcgtgctgacccagagcccggcgaccttatctctgtctccaggcgaacgtgccaccttatcttgtcgtgcctctcaaagcgttagctctagctacctggcgtggtaccaacagaagccgggtcaagcgccgcgtttactgatctacggtgcgtcttctcgcgccaccggcattccagcgcgtttttctggcagcggctctggtaccgattttacgttaaccatttctcgcttagaaccagaggatttcgcggtttattattgtcagcaagagaacagcccgccggttacgttcggtcagggtaccaaagtggagatcaaa

SEQ ID NO: 840 - DNA, 750 bp, synthetic construct
  source 1..750: mol_type = other DNA
caggtgcagttagttgaaagcggcggtggtgtggtgcaaccgggtcgtagcttacgtttatcttgcgcggcctctggctttacctttagcagctatgcgatgcattgggtgcgtcaggcgccaggtaagggcttagagtgggtggcggttatctcttatgacggtagcaacaagtactacgccgatagcgttaaaggccgcttcacgattagccgcgacaacagcaaaaataccttatacttacagatgaattctttacgcgccgaggatacggccgtttattattgtgcccgtggtcgctctgtttactactaccagccgttcgacctgtggggtcagtggggccagggtacgttagtgaccgtgagctctggtggttcttctcgttcttctagcagcggcggtggcggctctggcggcggcggtgaaattgttctgacccagagcccggcgaccctgtctttaagcccaggtgaacgtgcgacgctgtcttgtcgcgcgtctcaatctgtgtctagctcttatttagcgtggtatcaacaaaaaccaggccaagccccgcgtctgttaatttacggtgccagctctcgcgccacgggcattccggcccgttttagcggtagcggcagcggtacggattttaccttaacgattagccgcttagagccggaggactttgccgtgtactattgccaacagtactactctaccccgtttacgttcggtcaaggcacgaaagtggaaatcaaa

SEQ ID NO: 841 - DNA, 762 bp, synthetic construct
  source 1..762: mol_type = other DNA
caggtgcagttagttgaaagcggcggtggtgtggtgcaaccgggtcgtagcttacgtttatcttgcgcggcctctggctttacctttagcagctatgcgatgcattgggtgcgtcaggcgccaggtaagggcttagagtgggtggcggttatctcttatgacggtagcaacaagtactacgccgatagcgttaaaggccgcttcacgattagccgcgacaacagcaaaaataccttatacttacagatgaattctttacgcgccgaggatacggccgtttattattgtgcccgtggtacgaactcttaccgccgcctggtgtacgacgcgttcgatatttggggccaatggggtcaaggcaccctggtgacggtttcttctggtggctcttctcgtagcagctctagcggcggtggcggcagcggtggcggcggtgaaattgtgctgacccagagcccggccacgctgtctttaagcccgggcgagcgtgccacgttaagctgtcgcgccagccaaagcgttagctctagctatttagcctggtatcaacagaagccaggccaggcgccacgtttattaatctatggtgcctcttctcgtgcgaccggtattccggcgcgctttagcggctctggtagcggcaccgacttcaccctgacgatctctcgtttagagccggaggatttcgcggtgtactattgtcaagcctgggatagcagcacgcaccgcgtttttggtcagggcaccaaggttgagattaaa

SEQ ID NO: 842 - DNA, 756 bp, synthetic construct
  source 1..756: mol_type = other DNA
caggtgcagttagttgaaagcggcggtggtgtggtgcaaccgggtcgtagcttacgtttatcttgcgcggcctctggctttacctttagcagctatgcgatgcattgggtgcgtcaggcgccaggtaagggcttagagtgggtggcggttatctcttatgacggtagcaacaagtactacgccgatagcgttaaaggccgcttcacgattagccgcgacaacagcaaaaataccttatacttacagatgaattctttacgcgccgaggatacggccgtttattattgtgcccgtggtacgaactcttaccgccgcctggtgtacgacgcgttcgatatttggggccaatggggtcaaggcaccctggtgacggtttcttctggtggctcttctcgtagcagctctagcggcggtggcggcagcggtggcggcggtgaaattgtgctgacccagagcccggccacgctgtctttaagcccgggcgagcgtgccacgttaagctgtcgcgccagccaaagcgttagctctagctatttagcctggtatcaacagaagccaggccaggcgccacgtttattaatctatggtgcctcttctcgtgcgaccggtattccggcgcgctttagcggctctggtagcggcaccgacttcaccctgacgatctctcgtttagagccggaggatttcgcggtgtactattgtcaacaatataatacctacggtacgttcggccaaggcaccaaagttgagatcaaa

SEQ ID NO: 843 - DNA, 765 bp, synthetic construct
  source 1..765: mol_type = other DNA
caggtgcagttagttgaaagcggcggtggtgtggtgcaaccgggtcgtagcttacgtttatcttgcgcggcctctggctttacctttagcagctatgcgatgcattgggtgcgtcaggcgccaggtaagggcttagagtgggtggcggttatctcttatgacggtagcaacaagtactacgccgatagcgttaaaggccgcttcacgattagccgcgacaacagcaaaaataccttatacttacagatgaattctttacgcgccgaggatacggccgtttattattgtgcccgtggtacgaactcttaccgccgcctggtgtacgacgcgttcgatatttggggccaatggggtcaaggcaccctggtgacggtttcttctggtggctcttctcgtagcagctctagcggcggtggcggcagcggtggcggcggtgaaattgtgctgacccagagcccggccacgctgtctttaagcccgggcgagcgtgccacgttaagctgtcgcgccagccaaagcgttagctctagctatttagcctggtatcaacagaagccaggccaggcgccacgtttattaatctatggtgcctcttctcgtgcgaccggtattccggcgcgctttagcggctctggtagcggcaccgacttcaccctgacgatctctcgtttagagccggaggatttcgcggtgtactattgttcttcttatattagcggtacgacgcacgtgatctttggccagggtacgaaggtggagatcaaa

SEQ ID NO: 844 - DNA, 747 bp, synthetic construct
  source 1..747: mol_type = other DNA
caggtgcagttagttgaaagcggcggtggtgtggtgcaaccgggtcgtagcttacgtttatcttgcgcggcctctggctttacctttagcagctatgcgatgcattgggtgcgtcaggcgccaggtaagggcttagagtgggtggcggttatctcttatgacggtagcaacaagtactacgccgatagcgttaaaggccgcttcacgattagccgcgacaacagcaaaaataccttatacttacagatgaattctttacgcgccgaggatacggccgtttattattgtgcccgtggtgttggtgcccgctcttctaatctggactactggggccaatggggccagggcacgttagttaccgtgagcagcggtggttcttctcgcagctcttctagcggcggcggtggcagcggtggcggcggcgagattgtgttaacccagagcccggcgaccctgagcttatctccgggtgagcgtgcgaccttaagctgtcgcgccagccaatctgttagctctagctacctggcctggtatcagcaaaagccgggtcaggccccacgtctgctgatctatggtgcctctagccgcgccacgggtattccggcgcgctttagcggctctggcagcggcacggactttaccctgacgatcagccgtttagagccagaagacttcgcggtttattactgccgtcaaggcgcccactggccatgggcgtttggccaaggtacgaaggtggagattaaa

SEQ ID NO: 845 - DNA, 768 bp, synthetic construct
  source 1..768: mol_type = other DNA
caggtgcagttagttgaaagcggcggtggtgtggtgcaaccgggtcgtagcttacgtttatcttgcgcggcctctggctttacctttagcagctatgcgatgcattgggtgcgtcaggcgccaggtaagggcttagagtgggtggcggttatctcttatgacggtagcaacaagtactacgccgatagcgttaaaggccgcttcacgattagccgcgacaacagcaaaaataccttatacttacagatgaattctttacgcgccgaggatacggccgtttattattgtgcccgtcacgccgccgactactctttcagctatccatacgcgtcttatatggatccgtggggtcaatggggtcagggcaccctggttacggtttcttctggcggttctagccgtagctctagcagcggtggcggcggctctggcggcggtggcgaaattgtgctgacccagagcccagccaccttatctctgagcccgggtgaacgcgccacgctgtcttgtcgcgcgtctcagtctgtgtctagcagctacttagcgtggtaccagcaaaagccgggccaggccccgcgcttattaatttacggtgcctctagccgtgcgacgggcattccggcccgttttagcggttctggcagcggcacggactttaccttaacgatcagccgcttagaaccagaagactttgcggtttattactgtcaagcgtgggatagctcttctatcgttgtgttcggccagggcacgaaggttgaaatcaaa

SEQ ID NO: 846 - DNA, 771 bp, synthetic construct
  source 1..771: mol_type = other DNA
caggtgcagttagttgaaagcggcggtggtgtggtgcaaccgggtcgtagcttacgtttatcttgcgcggcctctggctttacctttagcagctatgcgatgcattgggtgcgtcaggcgccaggtaagggcttagagtgggtggcggttatctcttatgacggtagcaacaagtactacgccgatagcgttaaaggccgcttcacgattagccgcgacaacagcaaaaataccttatacttacagatgaattctttacgcgccgaggatacggccgtttattattgtgcccgtcacggtgactactacgactctagcggccgcgttggctactatggcgcgttcgacatctggggccagtggggccagggtacgttagttacggtgtcttctggcggcagctctcgtagctctagcagcggcggtggcggctctggcggcggcggcgaaattgtgctgacgcaaagcccagccaccctgagcttaagcccaggtgagcgtgccacgttaagctgtcgtgccagccaaagcgtgtcttctagctacctggcctggtaccagcagaaaccaggccaagccccacgtttattaatctacggcgcgagctctcgtgcgaccggtattccggcgcgcttcagcggcagcggttctggcaccgacttcacgctgacgatcagccgcctggagccggaagactttgccgtttactattgccagcaagccaactctccgccaattacctttggtcaaggtaccaaggttgaaatcaaa

SEQ ID NO: 847 - DNA, 747 bp, synthetic construct
  source 1..747: mol_type = other DNA
caggtgcagttagttgaaagcggcggtggtgtggtgcaaccgggtcgtagcttacgtttatcttgcgcggcctctggctttacctttagcagctatgcgatgcattgggtgcgtcaggcgccaggtaagggcttagagtgggtggcggttatctcttatgacggtagcaacaagtactacgccgatagcgttaaaggccgcttcacgattagccgcgacaacagcaaaaataccttatacttacagatgaattctttacgcgccgaggatacggccgtttattattgtgcccgtcacggtatcgccttaccaacggcgatggattactggggtcagtggggtcagggcaccttagttacggtgagcagcggcggttcttctcgctctagctcttctggcggcggcggtagcggcggtggcggcgaaatcgtgctgacgcagagcccggcgaccctgagcctgtctccaggcgagcgcgcgaccctgtcttgccgcgcctctcagtctgtttctagctcttatttagcgtggtaccagcagaagccaggccaagcgccacgcctgctgatttacggcgcctcttctcgtgccacgggtatcccggcgcgtttcagcggcagcggtagcggcaccgacttcaccctgaccatctctcgtctggagccagaggatttcgccgtgtactattgtcagcagtacgataacccaccagtgacctttggtcaaggtacgaaagttgaaattaaa

SEQ ID NO: 848 - DNA, 756 bp, synthetic construct
  source 1..756: mol_type = other DNA
caggtgcagttagttgaaagcggcggtggtgtggtgcaaccgggtcgtagcttacgtttatcttgcgcggcctctggctttacctttagcagctatgcgatgcattgggtgcgtcaggcgccaggtaagggcttagagtgggtggcggttatctcttatgacggtagcaacaagtactacgccgatagcgttaaaggccgcttcacgattagccgcgacaacagcaaaaataccttatacttacagatgaattctttacgcgccgaggatacggccgtttattattgtgcccgtcacggtgtttctggttcttcttatggcgccttcgatatctggggccagtggggccaaggtacgctggtgaccgtgtcttctggtggttctagccgctctagcagcagcggtggcggcggtagcggcggcggtggcgaaatcgtgctgacccagagcccggcgaccttatctctgtctccaggcgaacgtgccaccttatcttgtcgtgcctctcaaagcgttagctctagctacctggcgtggtaccaacagaagccgggtcaagcgccgcgtttactgatctacggtgcgtcttctcgcgccaccggcattccagcgcgtttttctggcagcggctctggtaccgattttacgttaaccatttctcgcttagaaccagaggatttcgcggtttattattgtcaggcctgggactctagcagcattgttgttttcggtcagggtaccaaagtggagatcaaa

SEQ ID NO: 849 - DNA, 756 bp, synthetic construct
  source 1..756: mol_type = other DNA
caggtgcagttagttgaaagcggcggtggtgtggtgcaaccgggtcgtagcttacgtttatcttgcgcggcctctggctttacctttagcagctatgcgatgcattgggtgcgtcaggcgccaggtaagggcttagagtgggtggcggttatctcttatgacggtagcaacaagtactacgccgatagcgttaaaggccgcttcacgattagccgcgacaacagcaaaaataccttatacttacagatgaattctttacgcgccgaggatacggccgtttattattgtgcccgtcaccactaccgctcttctacgcgtagccacggttttgacatttggggccagtggggtcaaggtaccctggtgaccgtttcttctggtggtagctctcgcagcagcagctctggcggcggtggcagcggcggtggcggcgagattgtgctgacccagagcccggcgacgttaagcttatctccgggcgaacgcgcgacgttatcttgccgcgcctctcagtctgtgtctagctcttatctggcctggtaccagcaaaaaccaggtcaggcgccgcgcctgttaatctacggcgcctcttctcgcgcgaccggcatcccggcgcgtttcagcggcagcggttctggcaccgatttcacgctgaccatctctcgcctggagccagaagactttgccgtgtattactgccaacaatctgataataatccaatcacgttcggccaaggcaccaaagttgagatcaaa

SEQ ID NO: 850 - DNA, 744 bp, synthetic construct
  source 1..744: mol_type = other DNA
caggtgcagttagttgaaagcggcggtggtgtggtgcaaccgggtcgtagcttacgtttatcttgcgcggcctctggctttacctttagcagctatgcgatgcattgggtgcgtcaggcgccaggtaagggcttagagtgggtggcggttatctcttatgacggtagcaacaagtactacgccgatagcgttaaaggccgcttcacgattagccgcgacaacagcaaaaataccttatacttacagatgaattctttacgcgccgaggatacggccgtttattattgtgcccgtcaccactactacggttctggttttgattactggggtcagtggggtcagggcaccttagttacggtgagcagcggcggttcttctcgctctagctcttctggcggcggcggtagcggcggtggcggcgaaatcgtgctgacgcagagcccggcgaccctgagcctgtctccaggcgagcgcgcgaccctgtcttgccgcgcctctcagtctgtttctagctcttatttagcgtggtaccagcagaagccaggccaagcgccacgcctgctgatttacggcgcctcttctcgtgccacgggtatcccggcgcgtttcagcggcagcggtagcggcaccgacttcaccctgaccatctctcgtctggagccagaggatttcgccgtgtactattgtcagcagtacgataacccaccagtgagctttggtcaaggtacgaaagttgaaattaaa

SEQ ID NO: 851 - DNA, 747 bp, synthetic construct
  source 1..747: mol_type = other DNA
caggtgcagttagttgaaagcggcggtggtgtggtgcaaccgggtcgtagcttacgtttatcttgcgcggcctctggctttacctttagcagctatgcgatgcattgggtgcgtcaggcgccaggtaagggcttagagtgggtggcggttatctcttatgacggtagcaacaagtactacgccgatagcgttaaaggccgcttcacgattagccgcgacaacagcaaaaataccttatacttacagatgaattctttacgcgccgaggatacggccgtttattattgtgcccgtcacatccgcggtggtatgaacgtttggggccagtggggtcaaggcacgctggtgaccgtttcttctggcggcagcagccgctcttcttcttctggcggtggtggcagcggcggtggcggcgagattgtgctgacgcagagcccagcgaccctgagcctgagcccgggcgagcgcgcgacgttaagctgccgtgccagccaatctgttagctcttcttacctggcctggtatcaacagaagccgggccaagccccgcgcctgttaatctatggcgcgtctagccgcgccacgggcatcccagcccgctttagcggctctggcagcggcacggattttaccttaacgattagccgtttagagccggaagacttcgccgtgtactactgcggtacctgggacagcagctctagcccaggtggtgtgtttggccaaggtacgaaggtggagattaaa

SEQ ID NO: 852 - DNA, 768 bp, synthetic construct
  source 1..768: mol_type = other DNA
caggtgcagttagttgaaagcggcggtggtgtggtgcaaccgggtcgtagcttacgtttatcttgcgcggcctctggctttacctttagcagctatgcgatgcattgggtgcgtcaggcgccaggtaagggcttagagtgggtggcggttatctcttatgacggtagcaacaagtactacgccgatagcgttaaaggccgcttcacgattagccgcgacaacagcaaaaataccttatacttacagatgaattctttacgcgccgaggatacggccgtttattattgtgcccgtcaccaaacggaccgcttatctagcggctactactatccagtgtatatggatttatggggtcaatggggccagggcaccttagttacggtttctagcggtggtagcagccgttctagcagctctggcggcggcggtagcggcggtggcggcgaaattgtgctgacccagtctccagcgacgttaagcctgagcccaggcgagcgcgccaccttatcttgtcgtgccagccaaagcgttagcagctcttacctggcctggtatcaacaaaaaccgggccaagcgccacgcttactgatctacggtgccagcagccgtgccaccggcattccagcgcgtttttctggtagcggcagcggtacggattttacgttaacgatttctcgcctggagccggaggattttgccgtgtactactgtcagacctgggattcttctacgggtgtgttcggccagggcacgaaggttgaaatcaaa

SEQ ID NO: 853 - DNA, 750 bp, synthetic construct
  source 1..750: mol_type = other DNA
caggtgcagttagttgaaagcggcggtggtgtggtgcaaccgggtcgtagcttacgtttatcttgcgcggcctctggctttacctttagcagctatgcgatgcattgggtgcgtcaggcgccaggtaagggcttagagtgggtggcggttatctcttatgacggtagcaacaagtactacgccgatagcgttaaaggccgcttcacgattagccgcgacaacagcaaaaataccttatacttacagatgaattctttacgcgccgaggatacggccgtttattattgtgcccgtcaccgcggtggtggttacggtcattatatggacgtttggggccaatggggccagggcacgttagttaccgtgagcagcggtggttcttctcgcagctcttctagcggcggcggtggcagcggtggcggcggcgagattgtgttaacccagagcccggcgaccctgagcttatctccgggtgagcgtgcgaccttaagctgtcgcgccagccaatctgttagctctagctacctggcctggtatcagcaaaagccgggtcaggccccacgtctgctgatctatggtgcctctagccgcgccacgggtattccggcgcgctttagcggctctggcagcggcacggactttaccctgacgatcagccgtttagagccagaagacttcgcggtttattactgccagacgtgggattcttctacggcggtgtttggtcaaggtacgaaagttgaaattaaa

SEQ ID NO: 854 - DNA, 756 bp, synthetic construct
  source 1..756: mol_type = other DNA
caggtgcagttagttgaaagcggcggtggtgtggtgcaaccgggtcgtagcttacgtttatcttgcgcggcctctggctttacctttagcagctatgcgatgcattgggtgcgtcaggcgccaggtaagggcttagagtgggtggcggttatctcttatgacggtagcaacaagtactacgccgatagcgttaaaggccgcttcacgattagccgcgacaacagcaaaaataccttatacttacagatgaattctttacgcgccgaggatacggccgtttattattgtgcccgtcacgttacgttatcttcttggtacagcattgactactggggccaatggggccagggcacgttagttaccgtgagcagcggtggttcttctcgcagctcttctagcggcggcggtggcagcggtggcggcggcgagattgtgttaacccagagcccggcgaccctgagcttatctccgggtgagcgtgcgaccttaagctgtcgcgccagccaatctgttagctctagctacctggcctggtatcagcaaaagccgggtcaggccccacgtctgctgatctatggtgcctctagccgcgccacgggtattccggcgcgctttagcggctctggcagcggcacggactttaccctgacgatcagccgtttagagccagaagacttcgcggtttattactgcggcacgtgggattcttctgccctgctggaagttttcggtcaaggcacgaaagtggaaatcaaa

SEQ ID NO: 855 - DNA, 750 bp, synthetic construct
  source 1..750: mol_type = other DNA
caggtgcagttagttgaaagcggcggtggtgtggtgcaaccgggtcgtagcttacgtttatcttgcgcggcctctggctttacctttagcagctatgcgatgcattgggtgcgtcaggcgccaggtaagggcttagagtgggtggcggttatctcttatgacggtagcaacaagtactacgccgatagcgttaaaggccgcttcacgattagccgcgacaacagcaaaaataccttatacttacagatgaattctttacgcgccgaggatacggccgtttattattgtgcccgtcactactcttcttctccagccggcgatttctggggtcagtggggtcagggcaccttagttacggtgagcagcggcggttcttctcgctctagctcttctggcggcggcggtagcggcggtggcggcgaaatcgtgctgacgcagagcccggcgaccctgagcctgtctccaggcgagcgcgcgaccctgtcttgccgcgcctctcagtctgtttctagctcttatttagcgtggtaccagcagaagccaggccaagcgccacgcctgctgatttacggcgcctcttctcgtgccacgggtatcccggcgcgtttcagcggcagcggtagcggcaccgacttcaccctgaccatctctcgtctggagccagaggatttcgccgtgtactattgtgcgacctgggacgattctttaaacggcccggtgttcggtcaaggtaccaaggtggaaattaaa

SEQ ID NO: 856 - DNA, 759 bp, synthetic construct
  source 1..759: mol_type = other DNA
caggtgcagttagttgaaagcggcggtggtgtggtgcaaccgggtcgtagcttacgtttatcttgcgcggcctctggctttacctttagcagctatgcgatgcattgggtgcgtcaggcgccaggtaagggcttagagtgggtggcggttatctcttatgacggtagcaacaagtactacgccgatagcgttaaaggccgcttcacgattagccgcgacaacagcaaaaataccttatacttacagatgaattctttacgcgccgaggatacggccgtttattattgtgcccgtcactactctgttatgtgggacaagccagtgtatatggactactggggccaatggggccagggcacgttagttaccgtgagcagcggtggttcttctcgcagctcttctagcggcggcggtggcagcggtggcggcggcgagattgtgttaacccagagcccggcgaccctgagcttatctccgggtgagcgtgcgaccttaagctgtcgcgccagccaatctgttagctctagctacctggcctggtatcagcaaaagccgggtcaggccccacgtctgctgatctatggtgcctctagccgcgccacgggtattccggcgcgctttagcggctctggcagcggcacggactttaccctgacgatcagccgtttagagccagaagacttcgcggtttattactgccagacgtgggattctacgacgcatgtggtgttcggtcaaggtaccaaggtggaaattaaa

SEQ ID NO: 857 - DNA, 747 bp, synthetic construct
  source 1..747: mol_type = other DNA
caggtgcagttagttgaaagcggcggtggtgtggtgcaaccgggtcgtagcttacgtttatcttgcgcggcctctggctttacctttagcagctatgcgatgcattgggtgcgtcaggcgccaggtaagggcttagagtgggtggcggttatctcttatgacggtagcaacaagtactacgccgatagcgttaaaggccgcttcacgattagccgcgacaacagcaaaaataccttatacttacagatgaattctttacgcgccgaggatacggccgtttattattgtgcccgtatccgctactggtcttaccaagacccgtggggccaatggggtcagggtaccctggtgacggtttctagcggcggcagctctcgctcttcttctagcggtggtggcggcagcggtggcggcggtgaaattgtgttaacccagtctccggcgaccctgagcctgagcccgggtgagcgtgccacgctgagctgccgcgcgtctcaatctgtgtcttcttcttatttagcgtggtaccagcaaaaaccgggtcaagcgccacgtttattaatttatggcgccagctctcgcgccaccggtatcccagcccgttttagcggtagcggcagcggtaccgattttacgttaaccattagccgcttagaaccggaggacttcgcggtttactattgtcaggtttgggattattctcgtaacaactgggtttttggccagggtacgaaggttgaaatcaaa

SEQ ID NO: 858 - DNA, 750 bp, synthetic construct
  source 1..750: mol_type = other DNA
caggtgcagttagttgaaagcggcggtggtgtggtgcaaccgggtcgtagcttacgtttatcttgcgcggcctctggctttacctttagcagctatgcgatgcattgggtgcgtcaggcgccaggtaagggcttagagtgggtggcggttatctcttatgacggtagcaacaagtactacgccgatagcgttaaaggccgcttcacgattagccgcgacaacagcaaaaataccttatacttacagatgaattctttacgcgccgaggatacggccgtttattattgtgcccgtaagttcgttggtgcctcttctacctttgactcttggggccaatggggccagggcacgttagttaccgtgagcagcggtggttcttctcgcagctcttctagcggcggcggtggcagcggtggcggcggcgagattgtgttaacccagagcccggcgaccctgagcttatctccgggtgagcgtgcgaccttaagctgtcgcgccagccaatctgttagctctagctacctggcctggtatcagcaaaagccgggtcaggccccacgtctgctgatctatggtgcctctagccgcgccacgggtattccggcgcgctttagcggctctggcagcggcacggactttaccctgacgatcagccgtttagagccagaagacttcgcggtttattactgccagcaaagctactctacgccgccgtggaccttcggtcaaggtaccaaggtggaaattaaa

SEQ ID NO: 859 - DNA, 762 bp, synthetic construct
  source 1..762: mol_type = other DNA
caggtgcagttagttgaaagcggcggtggtgtggtgcaaccgggtcgtagcttacgtttatcttgcgcggcctctggctttacctttagcagctatgcgatgcattgggtgcgtcaggcgccaggtaagggcttagagtgggtggcggttatctcttatgacggtagcaacaagtactacgccgatagcgttaaaggccgcttcacgattagccgcgacaacagcaaaaataccttatacttacagatgaattctttacgcgccgaggatacggccgtttattattgtgcccgtttaggtggtcgcgacggttactttattcgcaagggcgcctttgatatttggggtcaatggggtcagggcaccctggttacggtttcttctggcggttctagccgtagctctagcagcggtggcggcggctctggcggcggtggcgaaattgtgctgacccagagcccagccaccttatctctgagcccgggtgaacgcgccacgctgtcttgtcgcgcgtctcagtctgtgtctagcagctacttagcgtggtaccagcaaaagccgggccaggccccgcgcttattaatttacggtgcctctagccgtgcgacgggcattccggcccgttttagcggttctggcagcggcacggactttaccttaacgatcagccgcttagaaccagaagactttgcggtttattactgtcaacattataataactggccaccaacgtttggtcagggcaccaaggttgagattaaa

SEQ ID NO: 860 - DNA, 756 bp, synthetic construct
  source 1..756: mol_type = other DNA
caggtgcagttagttgaaagcggcggtggtgtggtgcaaccgggtcgtagcttacgtttatcttgcgcggcctctggctttacctttagcagctatgcgatgcattgggtgcgtcaggcgccaggtaagggcttagagtgggtggcggttatctcttatgacggtagcaacaagtactacgccgatagcgttaaaggccgcttcacgattagccgcgacaacagcaaaaataccttatacttacagatgaattctttacgcgccgaggatacggccgtttattattgtgcccgtttaggttcttggtacgccggttacggcgcgatggactactggggccaatggggccagggcacgttagttaccgtgagcagcggtggttcttctcgcagctcttctagcggcggcggtggcagcggtggcggcggcgagattgtgttaacccagagcccggcgaccctgagcttatctccgggtgagcgtgcgaccttaagctgtcgcgccagccaatctgttagctctagctacctggcctggtatcagcaaaagccgggtcaggccccacgtctgctgatctatggtgcctctagccgcgccacgggtattccggcgcgctttagcggctctggcagcggcacggactttaccctgacgatcagccgtttagagccagaagacttcgcggtttattactgccaggcctgggattcttctgccgcggtggtgttcggtcaaggtaccaaggtggaaattaaa

SEQ ID NO: 861 - DNA, 747 bp, synthetic construct
  source 1..747: mol_type = other DNA
caggtgcagttagttgaaagcggcggtggtgtggtgcaaccgggtcgtagcttacgtttatcttgcgcggcctctggctttacctttagcagctatgcgatgcattgggtgcgtcaggcgccaggtaagggcttagagtgggtggcggttatctcttatgacggtagcaacaagtactacgccgatagcgttaaaggccgcttcacgattagccgcgacaacagcaaaaataccttatacttacagatgaattctttacgcgccgaggatacggccgtttattattgtgcccgtttattatctacgtctaactggttcgatccgtggggtcaatggggccaaggcaccctggttacggttagcagcggcggctcttctcgctcttctagctctggtggcggcggctctggcggcggtggcgaaattgttctgacccaaagcccggcgaccctgagcctgagcccaggtgaacgcgccaccctgagctgtcgtgcctctcaaagcgtttcttctagctacctggcctggtatcaacagaaaccaggtcaggccccgcgcttactgatttatggtgcgtcttctcgcgcgacgggtatcccagcgcgtttttctggcagcggctctggcaccgatttcacgctgaccatttctcgcctggaaccagaggactttgccgtttattactgctctagctttggtggcaacaacaactggatttttggccaaggtacgaaggtggagattaaa

SEQ ID NO: 862 - DNA, 753 bp, synthetic construct
  source 1..753: mol_type = other DNA
caggtgcagttagttgaaagcggcggtggtgtggtgcaaccgggtcgtagcttacgtttatcttgcgcggcctctggctttacctttagcagctatgcgatgcattgggtgcgtcaggcgccaggtaagggcttagagtgggtggcggttatctcttatgacggtagcaacaagtactacgccgatagcgttaaaggccgcttcacgattagccgcgacaacagcaaaaataccttatacttacagatgaattctttacgcgccgaggatacggccgtttattattgtgcccgtttattatggtctcgcacgggtcaccgttttgactcttggggccaatggggccagggcacgttagttaccgtgagcagcggtggttcttctcgcagctcttctagcggcggcggtggcagcggtggcggcggcgagattgtgttaacccagagcccggcgaccctgagcttatctccgggtgagcgtgcgaccttaagctgtcgcgccagccaatctgttagctctagctacctggcctggtatcagcaaaagccgggtcaggccccacgtctgctgatctatggtgcctctagccgcgccacgggtattccggcgcgctttagcggctctggcagcggcacggactttaccctgacgatcagccgtttagagccagaagacttcgcggtttattactgccagcaacgttctaacccaccgggctatacgttcggtcaaggcacgaaagtggaaatcaaa

SEQ ID NO: 863 - DNA, 756 bp, synthetic construct
  source 1..756: mol_type = other DNA
caggtgcagttagttgaaagcggcggtggtgtggtgcaaccgggtcgtagcttacgtttatcttgcgcggcctctggctttacctttagcagctatgcgatgcattgggtgcgtcaggcgccaggtaagggcttagagtgggtggcggttatctcttatgacggtagcaacaagtactacgccgatagcgttaaaggccgcttcacgattagccgcgacaacagcaaaaataccttatacttacagatgaattctttacgcgccgaggatacggccgtttattattgtgcccgtttacgcggttcttactaccgcaattggtttgacccatggggccaatggggccagggcacgttagttaccgtgagcagcggtggttcttctcgcagctcttctagcggcggcggtggcagcggtggcggcggcgagattgtgttaacccagagcccggcgaccctgagcttatctccgggtgagcgtgcgaccttaagctgtcgcgccagccaatctgttagctctagctacctggcctggtatcagcaaaagccgggtcaggccccacgtctgctgatctatggtgcctctagccgcgccacgggtattccggcgcgctttagcggctctggcagcggcacggactttaccctgacgatcagccgtttagagccagaagacttcgcggtttattactgcggcacgtgggattcttctggtctgccgtatgttttcggtcaaggcacgaaagtggaaatcaaa

SEQ ID NO: 864 - DNA, 777 bp, synthetic construct
  source 1..777: mol_type = other DNA
caggtgcagttagttgaaagcggcggtggtgtggtgcaaccgggtcgtagcttacgtttatcttgcgcggcctctggctttacctttagcagctatgcgatgcattgggtgcgtcaggcgccaggtaagggcttagagtgggtggcggttatctcttatgacggtagcaacaagtactacgccgatagcgttaaaggccgcttcacgattagccgcgacaacagcaaaaataccttatacttacagatgaattctttacgcgccgaggatacggccgtttattattgtgcccgtttaacgcgcgcccaacaatctagcagcgcctaccgtttacgtagcagctactacatggacccgtggggccagtggggccaaggtacgttagttaccgtttctagcggcggctctagccgttctagcagcagcggtggcggcggtagcggcggcggcggcgaaattgtgttaacgcagtctccagcgaccctgtctctgtctccaggtgaacgcgccacgctgtcttgccgcgcgtctcagagcgtttctagctcttatttagcctggtatcagcagaagccgggtcaagccccgcgcttattaatctatggcgcgtctagccgtgcgacgggcattccggcccgctttagcggctctggtagcggcacggacttcaccttaacgatttctcgtttagaaccggaggatttcgccgtttattattgccaacaattagaccgttacccgccgaccttcggtcaaggcacgaaggtggagattaaa

SEQ ID NO: 865 - DNA, 744 bp, synthetic construct
  source 1..744: mol_type = other DNA
caggtgcagttagttgaaagcggcggtggtgtggtgcaaccgggtcgtagcttacgtttatcttgcgcggcctctggctttacctttagcagctatgcgatgcattgggtgcgtcaggcgccaggtaagggcttagagtgggtggcggttatctcttatgacggtagcaacaagtactacgccgatagcgttaaaggccgcttcacgattagccgcgacaacagcaaaaataccttatacttacagatgaattctttacgcgccgaggatacggccgtttattattgtgcccgtttaacgtctgaccactcttactattggggccaatggggtcagggtaccctggtgacggtttctagcggcggcagctctcgctcttcttctagcggtggtggcggcagcggtggcggcggtgaaattgtgttaacccagtctccggcgaccctgagcctgagcccgggtgagcgtgccacgctgagctgccgcgcgtctcaatctgtgtcttcttcttatttagcgtggtaccagcaaaaaccgggtcaagcgccacgtttattaatttatggcgccagctctcgcgccaccggtatcccagcccgttttagcggtagcggcagcggtaccgattttacgttaaccattagccgcttagaaccggaggacttcgcggtttactattgtcaggtttggcatagcggtgataaccgctgggtttttggccagggtacgaaggttgaaatcaaa

SEQ ID NO: 866 - DNA, 780 bp, synthetic construct
  source 1..780: mol_type = other DNA
caggtgcagttagttgaaagcggcggtggtgtggtgcaaccgggtcgtagcttacgtttatcttgcgcggcctctggctttacctttagcagctatgcgatgcattgggtgcgtcaggcgccaggtaagggcttagagtgggtggcggttatctcttatgacggtagcaacaagtactacgccgatagcgttaaaggccgcttcacgattagccgcgacaacagcaaaaataccttatacttacagatgaattctttacgcgccgaggatacggccgtttattattgtgcccgtatggaccgcgttggttctcgcggttatacctactacagcacgctgggcagctacgccatggacatttggggccagtggggccaaggtacgttagttaccgtttctagcggcggctctagccgttctagcagcagcggtggcggcggtagcggcggcggcggcgaaattgtgttaacgcagtctccagcgaccctgtctctgtctccaggtgaacgcgccacgctgtcttgccgcgcgtctcagagcgtttctagctcttatttagcctggtatcagcagaagccgggtcaagccccgcgcttattaatctatggcgcgtctagccgtgcgacgggcattccggcccgctttagcggctctggtagcggcacggacttcaccttaacgatttctcgtttagaaccggaggatttcgccgtttattattgccaacaagcctacagcccaccgattaccttcggtcaaggcacgaaggtggagattaaa

SEQ ID NO: 867 - DNA, 750 bp, synthetic construct
  source 1..750: mol_type = other DNA
caggtgcagttagttgaaagcggcggtggtgtggtgcaaccgggtcgtagcttacgtttatcttgcgcggcctctggctttacctttagcagctatgcgatgcattgggtgcgtcaggcgccaggtaagggcttagagtgggtggcggttatctcttatgacggtagcaacaagtactacgccgatagcgttaaaggccgcttcacgattagccgcgacaacagcaaaaataccttatacttacagatgaattctttacgcgccgaggatacggccgtttattattgtgcccgtatgggtggtggtaacgactctggtgcgtttgactactggggccaatggggccagggcacgttagttaccgtgagcagcggtggttcttctcgcagctcttctagcggcggcggtggcagcggtggcggcggcgagattgtgttaacccagagcccggcgaccctgagcttatctccgggtgagcgtgcgaccttaagctgtcgcgccagccaatctgttagctctagctacctggcctggtatcagcaaaagccgggtcaggccccacgtctgctgatctatggtgcctctagccgcgccacgggtattccggcgcgctttagcggctctggcagcggcacggactttaccctgacgatcagccgtttagagccagaagacttcgcggtttattactgccagcaatatgactctccaccggtgaccttcggtcaaggtaccaaggtggaaattaaa

SEQ ID NO: 868 - DNA, 765 bp, synthetic construct
  source 1..765: mol_type = other DNA
caggtgcagttagttgaaagcggcggtggtgtggtgcaaccgggtcgtagcttacgtttatcttgcgcggcctctggctttacctttagcagctatgcgatgcattgggtgcgtcaggcgccaggtaagggcttagagtgggtggcggttatctcttatgacggtagcaacaagtactacgccgatagcgttaaaggccgcttcacgattagccgcgacaacagcaaaaataccttatacttacagatgaattctttacgcgccgaggatacggccgtttattattgtgcccgtatgggtcaacactcttacggtaagaatagcttcgccgtgtacatggatgtgtggggccaatggggtcaaggcaccctggtgacggtttcttctggtggctcttctcgtagcagctctagcggcggtggcggcagcggtggcggcggtgaaattgtgctgacccagagcccggccacgctgtctttaagcccgggcgagcgtgccacgttaagctgtcgcgccagccaaagcgttagctctagctatttagcctggtatcaacagaagccaggccaggcgccacgtttattaatctatggtgcctcttctcgtgcgaccggtattccggcgcgctttagcggctctggtagcggcaccgacttcaccctgacgatctctcgtttagagccggaggatttcgcggtgtactattgtcaacaatttgatgatttaccaatcacgtttggtcagggcaccaaggttgagattaaa

SEQ ID NO: 869 - DNA, 750 bp, synthetic construct
  source 1..750: mol_type = other DNA
caggtgcagttagttgaaagcggcggtggtgtggtgcaaccgggtcgtagcttacgtttatcttgcgcggcctctggctttacctttagcagctatgcgatgcattgggtgcgtcaggcgccaggtaagggcttagagtgggtggcggttatctcttatgacggtagcaacaagtactacgccgatagcgttaaaggccgcttcacgattagccgcgacaacagcaaaaataccttatacttacagatgaattctttacgcgccgaggatacggccgtttattattgtgcccgtatgaagacgcgcaaggactggttcgacccgtggggccaatggggtcagggtaccctggtgacggtttctagcggcggcagctctcgctcttcttctagcggtggtggcggcagcggtggcggcggtgaaattgtgttaacccagtctccggcgaccctgagcctgagcccgggtgagcgtgccacgctgagctgccgcgcgtctcaatctgtgtcttcttcttatttagcgtggtaccagcaaaaaccgggtcaagcgccacgtttattaatttatggcgccagctctcgcgccaccggtatcccagcccgttttagcggtagcggcagcggtaccgattttacgttaaccattagccgcttagaaccggaggacttcgcggtttactattgtggcacgtgggatagctctctgccatctgttgtgtttggccaaggtacgaaggtggagattaaa

SEQ ID NO: 870 - DNA, 744 bp, synthetic construct
  source 1..744: mol_type = other DNA
caggtgcagttagttgaaagcggcggtggtgtggtgcaaccgggtcgtagcttacgtttatcttgcgcggcctctggctttacctttagcagctatgcgatgcattgggtgcgtcaggcgccaggtaagggcttagagtgggtggcggttatctcttatgacggtagcaacaagtactacgccgatagcgttaaaggccgcttcacgattagccgcgacaacagcaaaaataccttatacttacagatgaattctttacgcgccgaggatacggccgtttattattgtgcccgtatgcaacgctacggtatggacgtttggggtcagtggggccaaggtaccttagtgaccgtgtcttctggtggcagcagccgttcttcttcttctggtggcggtggtagcggcggcggtggcgaaatcgtgctgacccaaagcccggccaccctgagcctgagcccgggcgaacgcgccaccttatcttgccgtgcgtctcagtctgtttctagctcttacttagcgtggtaccagcaaaaaccaggccaggccccacgtttactgatctacggcgcgagctctcgtgccacgggtattccagcccgcttcagcggcagcggtagcggcaccgactttaccctgacgatcagccgtctggagccagaagatttcgccgtttattactgtgcgtcttattctaccggctctaccttatacgtttttggccagggtacgaaggttgaaatcaaa

SEQ ID NO: 871 - DNA, 738 bp, synthetic construct
  source 1..738: mol_type = other DNA
caggtgcagttagttgaaagcggcggtggtgtggtgcaaccgggtcgtagcttacgtttatcttgcgcggcctctggctttacctttagcagctatgcgatgcattgggtgcgtcaggcgccaggtaagggcttagagtgggtggcggttatctcttatgacggtagcaacaagtactacgccgatagcgttaaaggccgcttcacgattagccgcgacaacagcaaaaataccttatacttacagatgaattctttacgcgccgaggatacggccgtttattattgtgcccgtatgcaacgctacggtatggacgtttggggtcagtggggccaaggtaccttagtgaccgtgtcttctggtggcagcagccgttcttcttcttctggtggcggtggtagcggcggcggtggcgaaatcgtgctgacccaaagcccggccaccctgagcctgagcccgggcgaacgcgccaccttatcttgccgtgcgtctcagtctgtttctagctcttacttagcgtggtaccagcaaaaaccaggccaggccccacgtttactgatctacggcgcgagctctcgtgccacgggtattccagcccgcttcagcggcagcggtagcggcaccgactttaccctgacgatcagccgtctggagccagaagatttcgccgtttattactgtcagacgtgggattcttttggccaagtgttcggtcaaggcaccaaagttgagatcaaa

SEQ ID NO: 872 - DNA, 747 bp, synthetic construct
  source 1..747: mol_type = other DNA
caggtgcagttagttgaaagcggcggtggtgtggtgcaaccgggtcgtagcttacgtttatcttgcgcggcctctggctttacctttagcagctatgcgatgcattgggtgcgtcaggcgccaggtaagggcttagagtgggtggcggttatctcttatgacggtagcaacaagtactacgccgatagcgttaaaggccgcttcacgattagccgcgacaacagcaaaaataccttatacttacagatgaattctttacgcgccgaggatacggccgtttattattgtgcccgtaacggtcgcacggttacgaagggcatggatgtttggggtcagtggggtcagggcaccttagttacggtgagcagcggcggttcttctcgctctagctcttctggcggcggcggtagcggcggtggcggcgaaatcgtgctgacgcagagcccggcgaccctgagcctgtctccaggcgagcgcgcgaccctgtcttgccgcgcctctcagtctgtttctagctcttatttagcgtggtaccagcagaagccaggccaagcgccacgcctgctgatttacggcgcctcttctcgtgccacgggtatcccggcgcgtttcagcggcagcggtagcggcaccgacttcaccctgaccatctctcgtctggagccagaggatttcgccgtgtactattgtcagcagtcttattctccaccaccgacctttggtcaaggtacgaaagttgaaattaaa

SEQ ID NO: 873 - DNA, 738 bp, synthetic construct
  source 1..738: mol_type = other DNA
caggtgcagttagttgaaagcggcggtggtgtggtgcaaccgggtcgtagcttacgtttatcttgcgcggcctctggctttacctttagcagctatgcgatgcattgggtgcgtcaggcgccaggtaagggcttagagtgggtggcggttatctcttatgacggtagcaacaagtactacgccgatagcgttaaaggccgcttcacgattagccgcgacaacagcaaaaataccttatacttacagatgaattctttacgcgccgaggatacggccgtttattattgtgcccgtaacggttctttaggtttcgactattggggccaatggggtcagggtaccctggtgacggtttctagcggcggcagctctcgctcttcttctagcggtggtggcggcagcggtggcggcggtgaaattgtgttaacccagtctccggcgaccctgagcctgagcccgggtgagcgtgccacgctgagctgccgcgcgtctcaatctgtgtcttcttcttatttagcgtggtaccagcaaaaaccgggtcaagcgccacgtttattaatttatggcgccagctctcgcgccaccggtatcccagcccgttttagcggtagcggcagcggtaccgattttacgttaaccattagccgcttagaaccggaggacttcgcggtttactattgtcagcaagcgtattctccgccaatcacgtttggccagggtacgaaggttgaaatcaaa

SEQ ID NO: 874 - DNA, 744 bp, synthetic construct
  source 1..744: mol_type = other DNA
caggtgcagttagttgaaagcggcggtggtgtggtgcaaccgggtcgtagcttacgtttatcttgcgcggcctctggctttacctttagcagctatgcgatgcattgggtgcgtcaggcgccaggtaagggcttagagtgggtggcggttatctcttatgacggtagcaacaagtactacgccgatagcgttaaaggccgcttcacgattagccgcgacaacagcaaaaataccttatacttacagatgaattctttacgcgccgaggatacggccgtttattattgtgcccgtaaccgcggttggacgggttctttcgattattggggtcaatggggccaaggcaccctggttacggttagcagcggcggctcttctcgctcttctagctctggtggcggcggctctggcggcggtggcgaaattgttctgacccaaagcccggcgaccctgagcctgagcccaggtgaacgcgccaccctgagctgtcgtgcctctcaaagcgtttcttctagctacctggcctggtatcaacagaaaccaggtcaggccccgcgcttactgatttatggtgcgtcttctcgcgcgacgggtatcccagcgcgtttttctggcagcggctctggcaccgatttcacgctgaccatttctcgcctggaaccagaggactttgccgtttattactgccaacaggcgaacagcttcccaccaacctttggccaaggtacgaaggtggagattaaa

SEQ ID NO: 875 - DNA, 747 bp, synthetic construct
  source 1..747: mol_type = other DNA
caggtgcagttagttgaaagcggcggtggtgtggtgcaaccgggtcgtagcttacgtttatcttgcgcggcctctggctttacctttagcagctatgcgatgcattgggtgcgtcaggcgccaggtaagggcttagagtgggtggcggttatctcttatgacggtagcaacaagtactacgccgatagcgttaaaggccgcttcacgattagccgcgacaacagcaaaaataccttatacttacagatgaattctttacgcgccgaggatacggccgtttattattgtgcccgtaaccgcaactactctgccggttttgattactggggtcagtggggtcagggcaccttagttacggtgagcagcggcggttcttctcgctctagctcttctggcggcggcggtagcggcggtggcggcgaaatcgtgctgacgcagagcccggcgaccctgagcctgtctccaggcgagcgcgcgaccctgtcttgccgcgcctctcagtctgtttctagctcttatttagcgtggtaccagcagaagccaggccaagcgccacgcctgctgatttacggcgcctcttctcgtgccacgggtatcccggcgcgtttcagcggcagcggtagcggcaccgacttcaccctgaccatctctcgtctggagccagaggatttcgccgtgtactattgtcagcagtacggctcttctccaatgattacctttggtcaaggtacgaaagttgaaattaaa

SEQ ID NO: 876 - DNA, 750 bp, synthetic construct
  source 1..750: mol_type = other DNA
caggtgcagttagttgaaagcggcggtggtgtggtgcaaccgggtcgtagcttacgtttatcttgcgcggcctctggctttacctttagcagctatgcgatgcattgggtgcgtcaggcgccaggtaagggcttagagtgggtggcggttatctcttatgacggtagcaacaagtactacgccgatagcgttaaaggccgcttcacgattagccgcgacaacagcaaaaataccttatacttacagatgaattctttacgcgccgaggatacggccgtttattattgtgcccgtaaccgcgttccaaagtacccaatggatgtgtggggtcaatggggccaaggcaccctggttacggttagcagcggcggctcttctcgctcttctagctctggtggcggcggctctggcggcggtggcgaaattgttctgacccaaagcccggcgaccctgagcctgagcccaggtgaacgcgccaccctgagctgtcgtgcctctcaaagcgtttcttctagctacctggcctggtatcaacagaaaccaggtcaggccccgcgcttactgatttatggtgcgtcttctcgcgcgacgggtatcccagcgcgtttttctggcagcggctctggcaccgatttcacgctgaccatttctcgcctggaaccagaggactttgccgtttattactgccaaatgtgggatagctctagcgaccactctgtgtttggccaaggtacgaaggtggagattaaa

SEQ ID NO: 877 - DNA, 750 bp, synthetic construct
  source 1..750: mol_type = other DNA
caggtgcagttagttgaaagcggcggtggtgtggtgcaaccgggtcgtagcttacgtttatcttgcgcggcctctggctttacctttagcagctatgcgatgcattgggtgcgtcaggcgccaggtaagggcttagagtgggtggcggttatctcttatgacggtagcaacaagtactacgccgatagcgttaaaggccgcttcacgattagccgcgacaacagcaaaaataccttatacttacagatgaattctttacgcgccgaggatacggccgtttattattgtgcccgtaaccgcgttccaaagtacccaatggatgtgtggggtcaatggggccaaggcaccctggttacggttagcagcggcggctcttctcgctcttctagctctggtggcggcggctctggcggcggtggcgaaattgttctgacccaaagcccggcgaccctgagcctgagcccaggtgaacgcgccaccctgagctgtcgtgcctctcaaagcgtttcttctagctacctggcctggtatcaacagaaaccaggtcaggccccgcgcttactgatttatggtgcgtcttctcgcgcgacgggtatcccagcgcgtttttctggcagcggctctggcaccgatttcacgctgaccatttctcgcctggaaccagaggactttgccgtttattactgccaagtgtgggattctagctctgaccacgtggtgtttggtcaaggtacgaaagttgaaattaaa

SEQ ID NO: 878 - DNA, 771 bp, synthetic construct
  source 1..771: mol_type = other DNA
caggtgcagttagttgaaagcggcggtggtgtggtgcaaccgggtcgtagcttacgtttatcttgcgcggcctctggctttacctttagcagctatgcgatgcattgggtgcgtcaggcgccaggtaagggcttagagtgggtggcggttatctcttatgacggtagcaacaagtactacgccgatagcgttaaaggccgcttcacgattagccgcgacaacagcaaaaataccttatacttacagatgaattctttacgcgccgaggatacggccgtttattattgtgcccgtcaatacatctctggtggttacagctattcttctcgtttaagctatggcatggacccatggggtcagtggggccagggcacgttagttacggttagctctggtggcagcagccgcagcagctctagcggcggcggtggcagcggtggcggcggcgaaattgtgctgacccaatctccggccacgctgagcctgtctccgggtgagcgcgcgacgttatcttgccgcgcgtctcagtctgtgagctcttcttatttagcgtggtaccaacagaaaccgggtcaggccccacgcctgttaatctacggtgcgagcagccgcgcgaccggcatcccggcgcgtttctctggcagcggctctggtaccgatttcacgttaaccatctctcgtttagaaccagaagatttcgcggtttactactgccagcaggccaactctccaccgatcacctttggccaaggtacgaaagttgagattaaa

SEQ ID NO: 879 - DNA, 771 bp, synthetic construct
  source 1..771: mol_type = other DNA
caggtgcagttagttgaaagcggcggtggtgtggtgcaaccgggtcgtagcttacgtttatcttgcgcggcctctggctttacctttagcagctatgcgatgcattgggtgcgtcaggcgccaggtaagggcttagagtgggtggcggttatctcttatgacggtagcaacaagtactacgccgatagcgttaaaggccgcttcacgattagccgcgacaacagcaaaaataccttatacttacagatgaattctttacgcgccgaggatacggccgtttattattgtgcccgtcaatacatctctggtggttacagctattcttctcgtttaagctatggcatggacccatggggtcagtggggccagggcacgttagttacggttagctctggtggcagcagccgcagcagctctagcggcggcggtggcagcggtggcggcggcgaaattgtgctgacccaatctccggccacgctgagcctgtctccgggtgagcgcgcgacgttatcttgccgcgcgtctcagtctgtgagctcttcttatttagcgtggtaccaacagaaaccgggtcaggccccacgcctgttaatctacggtgcgagcagccgcgcgaccggcatcccggcgcgtttctctggcagcggctctggtaccgatttcacgttaaccatctctcgtttagaaccagaagatttcgcggtttactactgccagcagtcttactctccaccggttacctttggccaaggtacgaaagttgagattaaa

SEQ ID NO: 880 - DNA, 756 bp, synthetic construct
  source 1..756: mol_type = other DNA
caggtgcagttagttgaaagcggcggtggtgtggtgcaaccgggtcgtagcttacgtttatcttgcgcggcctctggctttacctttagcagctatgcgatgcattgggtgcgtcaggcgccaggtaagggcttagagtgggtggcggttatctcttatgacggtagcaacaagtactacgccgatagcgttaaaggccgcttcacgattagccgcgacaacagcaaaaataccttatacttacagatgaattctttacgcgccgaggatacggccgtttattattgtgcccgtcgcttagtttcttctgactctccgtatttcgactattggggtcagtggggccagggtacgttagtgaccgtgagctctggtggttcttctcgttcttctagcagcggcggtggcggctctggcggcggcggtgaaattgttctgacccagagcccggcgaccctgtctttaagcccaggtgaacgtgcgacgctgtcttgtcgcgcgtctcaatctgtgtctagctcttatttagcgtggtatcaacaaaaaccaggccaagccccgcgtctgttaatttacggtgccagctctcgcgccacgggcattccggcccgttttagcggtagcggcagcggtacggattttaccttaacgattagccgcttagagccggaggactttgccgtgtactattgccaagcgtgggactcttctagcagcacccgcgttttcggtcagggtaccaaagtggagatcaaa

SEQ ID NO: 881 - DNA, 759 bp, synthetic construct
  source 1..759: mol_type = other DNA
caggtgcagttagttgaaagcggcggtggtgtggtgcaaccgggtcgtagcttacgtttatcttgcgcggcctctggctttacctttagcagctatgcgatgcattgggtgcgtcaggcgccaggtaagggcttagagtgggtggcggttatctcttatgacggtagcaacaagtactacgccgatagcgttaaaggccgcttcacgattagccgcgacaacagcaaaaataccttatacttacagatgaattctttacgcgccgaggatacggccgtttattattgtgcccgtcgcccagcccgctcttctcaaggccgtccaatcgattactggggccagtggggccaaggtacgctggtgaccgtgtcttctggtggttctagccgctctagcagcagcggtggcggcggtagcggcggcggtggcgaaatcgtgctgacccagagcccggcgaccttatctctgtctccaggcgaacgtgccaccttatcttgtcgtgcctctcaaagcgttagctctagctacctggcgtggtaccaacagaagccgggtcaagcgccgcgtttactgatctacggtgcgtcttctcgcgccaccggcattccagcgcgtttttctggcagcggctctggtaccgattttacgttaaccatttctcgcttagaaccagaggatttcgcggtttattattgtcaggtttgggactctagcagcgatcactgggttttcggtcagggtaccaaagtggagatcaaa

SEQ ID NO: 882 - DNA, 741 bp, synthetic construct
  source 1..741: mol_type = other DNA
caggtgcagttagttgaaagcggcggtggtgtggtgcaaccgggtcgtagcttacgtttatcttgcgcggcctctggctttacctttagcagctatgcgatgcattgggtgcgtcaggcgccaggtaagggcttagagtgggtggcggttatctcttatgacggtagcaacaagtactacgccgatagcgttaaaggccgcttcacgattagccgcgacaacagcaaaaataccttatacttacagatgaattctttacgcgccgaggatacggccgtttattattgtgcccgttctggtcaatacgccggtttagattattggggtcaatggggccaaggcaccctggttacggttagcagcggcggctcttctcgctcttctagctctggtggcggcggctctggcggcggtggcgaaattgttctgacccaaagcccggcgaccctgagcctgagcccaggtgaacgcgccaccctgagctgtcgtgcctctcaaagcgtttcttctagctacctggcctggtatcaacagaaaccaggtcaggccccgcgcttactgatttatggtgcgtcttctcgcgcgacgggtatcccagcgcgtttttctggcagcggctctggcaccgatttcacgctgaccatttctcgcctggaaccagaggactttgccgtttattactgccaacaggcgaacagcttcccattaacctttggccaaggtacgaaggtggagattaaa

SEQ ID NO: 883 - DNA, 741 bp, synthetic construct
  source 1..741: mol_type = other DNA
caggtgcagttagttgaaagcggcggtggtgtggtgcaaccgggtcgtagcttacgtttatcttgcgcggcctctggctttacctttagcagctatgcgatgcattgggtgcgtcaggcgccaggtaagggcttagagtgggtggcggttatctcttatgacggtagcaacaagtactacgccgatagcgttaaaggccgcttcacgattagccgcgacaacagcaaaaataccttatacttacagatgaattctttacgcgccgaggatacggccgtttattattgtgcccgttctttaaacggtggtgccggtgattattggggtcaatggggccaaggcaccctggttacggttagcagcggcggctcttctcgctcttctagctctggtggcggcggctctggcggcggtggcgaaattgttctgacccaaagcccggcgaccctgagcctgagcccaggtgaacgcgccaccctgagctgtcgtgcctctcaaagcgtttcttctagctacctggcctggtatcaacagaaaccaggtcaggccccgcgcttactgatttatggtgcgtcttctcgcgcgacgggtatcccagcgcgtttttctggcagcggctctggcaccgatttcacgctgaccatttctcgcctggaaccagaggactttgccgtttattactgccaacaggcgtacagcccaccaatcacctttggccaaggtacgaaggtggagattaaa

SEQ ID NO: 884 - DNA, 750 bp, synthetic construct
  source 1..750: mol_type = other DNA
caggtgcagttagttgaaagcggcggtggtgtggtgcaaccgggtcgtagcttacgtttatcttgcgcggcctctggctttacctttagcagctatgcgatgcattgggtgcgtcaggcgccaggtaagggcttagagtgggtggcggttatctcttatgacggtagcaacaagtactacgccgatagcgttaaaggccgcttcacgattagccgcgacaacagcaaaaataccttatacttacagatgaattctttacgcgccgaggatacggccgtttattattgtgcccgttctccacgcccacacggtggtccgtatttagactattggggtcagtggggccagggtacgttagtgaccgtgagctctggtggttcttctcgttcttctagcagcggcggtggcggctctggcggcggcggtgaaattgttctgacccagagcccggcgaccctgtctttaagcccaggtgaacgtgcgacgctgtcttgtcgcgcgtctcaatctgtgtctagctcttatttagcgtggtatcaacaaaaaccaggccaagccccgcgtctgttaatttacggtgccagctctcgcgccacgggcattccggcccgttttagcggtagcggcagcggtacggattttaccttaacgattagccgcttagagccggaggactttgccgtgtactattgccaacagtcttactctaccccgtggaccttcggtcaaggtaccaaggtggaaattaaa

SEQ ID NO: 885 - DNA, 744 bp, synthetic construct
  source 1..744: mol_type = other DNA
caggtgcagttagttgaaagcggcggtggtgtggtgcaaccgggtcgtagcttacgtttatcttgcgcggcctctggctttacctttagcagctatgcgatgcattgggtgcgtcaggcgccaggtaagggcttagagtgggtggcggttatctcttatgacggtagcaacaagtactacgccgatagcgttaaaggccgcttcacgattagccgcgacaacagcaaaaataccttatacttacagatgaattctttacgcgccgaggatacggccgtttattattgtgcccgttcttctggttcttaccgcccatttgattcttggggtcagtggggtcagggcaccttagttacggtgagcagcggcggttcttctcgctctagctcttctggcggcggcggtagcggcggtggcggcgaaatcgtgctgacgcagagcccggcgaccctgagcctgtctccaggcgagcgcgcgaccctgtcttgccgcgcctctcagtctgtttctagctcttatttagcgtggtaccagcagaagccaggccaagcgccacgcctgctgatttacggcgcctcttctcgtgccacgggtatcccggcgcgtttcagcggcagcggtagcggcaccgacttcaccctgaccatctctcgtctggagccagaggatttcgccgtgtactattgtcagcagtactatgactggccaccaacctttggccaaggtacgaaggtggagattaaa

SEQ ID NO: 886 - DNA, 747 bp, synthetic construct
  source 1..747: mol_type = other DNA
caggtgcagttagttgaaagcggcggtggtgtggtgcaaccgggtcgtagcttacgtttatcttgcgcggcctctggctttacctttagcagctatgcgatgcattgggtgcgtcaggcgccaggtaagggcttagagtgggtggcggttatctcttatgacggtagcaacaagtactacgccgatagcgttaaaggccgcttcacgattagccgcgacaacagcaaaaataccttatacttacagatgaattctttacgcgccgaggatacggccgtttattattgtgcccgttcttctggttcttaccgcccatttgattcttggggtcagtggggtcagggcaccttagttacggtgagcagcggcggttcttctcgctctagctcttctggcggcggcggtagcggcggtggcggcgaaatcgtgctgacgcagagcccggcgaccctgagcctgtctccaggcgagcgcgcgaccctgtcttgccgcgcctctcagtctgtttctagctcttatttagcgtggtaccagcagaagccaggccaagcgccacgcctgctgatttacggcgcctcttctcgtgccacgggtatcccggcgcgtttcagcggcagcggtagcggcaccgacttcaccctgaccatctctcgtctggagccagaggatttcgccgtgtactattgtcagcagtactattctacgccaccgtataccttcggtcaaggtaccaaggtggaaattaaa

SEQ ID NO: 887 - DNA, 780 bp, synthetic construct
  source 1..780: mol_type = other DNA
caggtgcagttagttgaaagcggcggtggtgtggtgcaaccgggtcgtagcttacgtttatcttgcgcggcctctggctttacctttagcagctatgcgatgcattgggtgcgtcaggcgccaggtaagggcttagagtgggtggcggttatctcttatgacggtagcaacaagtactacgccgatagcgttaaaggccgcttcacgattagccgcgacaacagcaaaaataccttatacttacagatgaattctttacgcgccgaggatacggccgtttattattgtgcccgttcttacgtttaccgcatcggtacctggagctacgacgtgtacctgggcgatgtttggggtcaatggggccagggcaccttagttacggtttctagcggtggtagcagccgttctagcagctctggcggcggcggtagcggcggtggcggcgaaattgtgctgacccagtctccagcgacgttaagcctgagcccaggcgagcgcgccaccttatcttgtcgtgccagccaaagcgttagcagctcttacctggcctggtatcaacaaaaaccgggccaagcgccacgcttactgatctacggtgccagcagccgtgccaccggcattccagcgcgtttttctggtagcggcagcggtacggattttacgttaacgatttctcgcctggagccggaggattttgccgtgtactactgtcaggtgtgggattcttcttcttctgatcaaaattatgtgttcggtcaaggcacgaaggtggagattaaa

SEQ ID NO: 888 - DNA, 747 bp, synthetic construct
  source 1..747: mol_type = other DNA
caggtgcagttagttgaaagcggcggtggtgtggtgcaaccgggtcgtagcttacgtttatcttgcgcggcctctggctttacctttagcagctatgcgatgcattgggtgcgtcaggcgccaggtaagggcttagagtgggtggcggttatctcttatgacggtagcaacaagtactacgccgatagcgttaaaggccgcttcacgattagccgcgacaacagcaaaaataccttatacttacagatgaattctttacgcgccgaggatacggccgtttattattgtgcccgtacgcgctacccatactctatggacgtgtggggccaatggggtcagggtaccctggtgacggtttctagcggcggcagctctcgctcttcttctagcggtggtggcggcagcggtggcggcggtgaaattgtgttaacccagtctccggcgaccctgagcctgagcccgggtgagcgtgccacgctgagctgccgcgcgtctcaatctgtgtcttcttcttatttagcgtggtaccagcaaaaaccgggtcaagcgccacgtttattaatttatggcgccagctctcgcgccaccggtatcccagcccgttttagcggtagcggcagcggtaccgattttacgttaaccattagccgcttagaaccggaggacttcgcggtttactattgtggcacgtgggatagctctctgcgctctggtttttttggccaaggtacgaaggtggagattaaa

SEQ ID NO: 889 - DNA, 756 bp, synthetic construct
  source 1..756: mol_type = other DNA
caggtgcagttagttgaaagcggcggtggtgtggtgcaaccgggtcgtagcttacgtttatcttgcgcggcctctggctttacctttagcagctatgcgatgcattgggtgcgtcaggcgccaggtaagggcttagagtgggtggcggttatctcttatgacggtagcaacaagtactacgccgatagcgttaaaggccgcttcacgattagccgcgacaacagcaaaaataccttatacttacagatgaattctttacgcgccgaggatacggccgtttattattgtgcccgtacgtcttctggttctacggccgcgccgatcggttattggggtcagtggggccagggtacgttagtgaccgtgagctctggtggttcttctcgttcttctagcagcggcggtggcggctctggcggcggcggtgaaattgttctgacccagagcccggcgaccctgtctttaagcccaggtgaacgtgcgacgctgtcttgtcgcgcgtctcaatctgtgtctagctcttatttagcgtggtatcaacaaaaaccaggccaagccccgcgtctgttaatttacggtgccagctctcgcgccacgggcattccggcccgttttagcggtagcggcagcggtacggattttaccttaacgattagccgcttagagccggaggactttgccgtgtactattgcgaggcgtgggacgacaacctgagccgtcgcgttttcggtcagggtaccaaagtggagatcaaa

SEQ ID NO: 890 - DNA, 747 bp, synthetic construct
  source 1..747: mol_type = other DNA
caggtgcagttagttgaaagcggcggtggtgtggtgcaaccgggtcgtagcttacgtttatcttgcgcggcctctggctttacctttagcagctatgcgatgcattgggtgcgtcaggcgccaggtaagggcttagagtgggtggcggttatctcttatgacggtagcaacaagtactacgccgatagcgttaaaggccgcttcacgattagccgcgacaacagcaaaaataccttatacttacagatgaattctttacgcgccgaggatacggccgtttattattgtgcccgtgttgcccgcggtggttacaagaccgcggacttatggggccaatggggccagggcacgttagttaccgtgagcagcggtggttcttctcgcagctcttctagcggcggcggtggcagcggtggcggcggcgagattgtgttaacccagagcccggcgaccctgagcttatctccgggtgagcgtgcgaccttaagctgtcgcgccagccaatctgttagctctagctacctggcctggtatcagcaaaagccgggtcaggccccacgtctgctgatctatggtgcctctagccgcgccacgggtattccggcgcgctttagcggctctggcagcggcacggactttaccctgacgatcagccgtttagagccagaagacttcgcggtttattactgcctgcaaggcgacggtttaccgcgtaccttcggtcaaggtaccaaggtggaaattaaa

SEQ ID NO: 891 - DNA, 750 bp, synthetic construct
  source 1..750: mol_type = other DNA
caggtgcagttagttgaaagcggcggtggtgtggtgcaaccgggtcgtagcttacgtttatcttgcgcggcctctggctttacctttagcagctatgcgatgcattgggtgcgtcaggcgccaggtaagggcttagagtgggtggcggttatctcttatgacggtagcaacaagtactacgccgatagcgttaaaggccgcttcacgattagccgcgacaacagcaaaaataccttatacttacagatgaattctttacgcgccgaggatacggccgtttattattgtgcccgtgttgcctcttcttctgccggtggcgtggactactggggccaatggggccagggcacgttagttaccgtgagcagcggtggttcttctcgcagctcttctagcggcggcggtggcagcggtggcggcggcgagattgtgttaacccagagcccggcgaccctgagcttatctccgggtgagcgtgcgaccttaagctgtcgcgccagccaatctgttagctctagctacctggcctggtatcagcaaaagccgggtcaggccccacgtctgctgatctatggtgcctctagccgcgccacgggtattccggcgcgctttagcggctctggcagcggcacggactttaccctgacgatcagccgtttagagccagaagacttcgcggtttattactgccagcaatataacaactggccagcgctgaccttcggtcaaggtaccaaggtggaaattaaa

SEQ ID NO: 892 - DNA, 747 bp, synthetic construct
  source 1..747: mol_type = other DNA
caggtgcagttagttgaaagcggcggtggtgtggtgcaaccgggtcgtagcttacgtttatcttgcgcggcctctggctttacctttagcagctatgcgatgcattgggtgcgtcaggcgccaggtaagggcttagagtgggtggcggttatctcttatgacggtagcaacaagtactacgccgatagcgttaaaggccgcttcacgattagccgcgacaacagcaaaaataccttatacttacagatgaattctttacgcgccgaggatacggccgtttattattgtgcccgtgttggttacggtgactacggtggcattgactactggggccaatggggccagggcacgttagttaccgtgagcagcggtggttcttctcgcagctcttctagcggcggcggtggcagcggtggcggcggcgagattgtgttaacccagagcccggcgaccctgagcttatctccgggtgagcgtgcgaccttaagctgtcgcgccagccaatctgttagctctagctacctggcctggtatcagcaaaagccgggtcaggccccacgtctgctgatctatggtgcctctagccgcgccacgggtattccggcgcgctttagcggctctggcagcggcacggactttaccctgacgatcagccgtttagagccagaagacttcgcggtttattactgcagctcttatacgtcttctgcgctggaattcggtcaaggtaccaaggtggaaattaaa

SEQ ID NO: 893 - DNA, 747 bp, synthetic construct
  source 1..747: mol_type = other DNA
caggtgcagttagttgaaagcggcggtggtgtggtgcaaccgggtcgtagcttacgtttatcttgcgcggcctctggctttacctttagcagctatgcgatgcattgggtgcgtcaggcgccaggtaagggcttagagtgggtggcggttatctcttatgacggtagcaacaagtactacgccgatagcgttaaaggccgcttcacgattagccgcgacaacagcaaaaataccttatacttacagatgaattctttacgcgccgaggatacggccgtttattattgtgcccgtgttaactaccgctacttagccggctttgacccatggggccaatggggccagggcacgttagttaccgtgagcagcggtggttcttctcgcagctcttctagcggcggcggtggcagcggtggcggcggcgagattgtgttaacccagagcccggcgaccctgagcttatctccgggtgagcgtgcgaccttaagctgtcgcgccagccaatctgttagctctagctacctggcctggtatcagcaaaagccgggtcaggccccacgtctgctgatctatggtgcctctagccgcgccacgggtattccggcgcgctttagcggctctggcagcggcacggactttaccctgacgatcagccgtttagagccagaagacttcgcggtttattactgccagcaaaccaactctttcccgccgaccttcggtcaaggtaccaaggtggaaattaaa

SEQ ID NO: 894 - DNA, 741 bp, synthetic construct
  source 1..741: mol_type = other DNA
caggtgcagttagttgaaagcggcggtggtgtggtgcaaccgggtcgtagcttacgtttatcttgcgcggcctctggctttacctttagcagctatgcgatgcattgggtgcgtcaggcgccaggtaagggcttagagtgggtggcggttatctcttatgacggtagcaacaagtactacgccgatagcgttaaaggccgcttcacgattagccgcgacaacagcaaaaataccttatacttacagatgaattctttacgcgccgaggatacggccgtttattattgtgcccgtgttccacgcgacttagactactggggccagtggggtcaaggcacgctggtgaccgtttcttctggcggcagcagccgctcttcttcttctggcggtggtggcagcggcggtggcggcgagattgtgctgacgcagagcccagcgaccctgagcctgagcccgggcgagcgcgcgacgttaagctgccgtgccagccaatctgttagctcttcttacctggcctggtatcaacagaagccgggccaagccccgcgcctgttaatctatggcgcgtctagccgcgccacgggcatcccagcccgctttagcggctctggcagcggcacggattttaccttaacgattagccgtttagagccggaagacttcgccgtgtactactgccaagtgtgggacagcagcatcagccactgggttttcggccagggcacgaaggttgagattaaa

SEQ ID NO: 895 - DNA, 741 bp, synthetic construct
  source 1..741: mol_type = other DNA
caggtgcagttagttgaaagcggcggtggtgtggtgcaaccgggtcgtagcttacgtttatcttgcgcggcctctggctttacctttagcagctatgcgatgcattgggtgcgtcaggcgccaggtaagggcttagagtgggtggcggttatctcttatgacggtagcaacaagtactacgccgatagcgttaaaggccgcttcacgattagccgcgacaacagcaaaaataccttatacttacagatgaattctttacgcgccgaggatacggccgtttattattgtgcccgtgttccacgcgacttagactactggggccagtggggtcaaggcacgctggtgaccgtttcttctggcggcagcagccgctcttcttcttctggcggtggtggcagcggcggtggcggcgagattgtgctgacgcagagcccagcgaccctgagcctgagcccgggcgagcgcgcgacgttaagctgccgtgccagccaatctgttagctcttcttacctggcctggtatcaacagaagccgggccaagccccgcgcctgttaatctatggcgcgtctagccgcgccacgggcatcccagcccgctttagcggctctggcagcggcacggattttaccttaacgattagccgtttagagccggaagacttcgccgtgtactactgccaagtgtgggacagcagctctgatcactgggttttcggccagggcacgaaggttgagattaaa

SEQ ID NO: 896 - DNA, 750 bp, synthetic construct
  source 1..750: mol_type = other DNA
caggtgcagttagttgaaagcggcggtggtgtggtgcaaccgggtcgtagcttacgtttatcttgcgcggcctctggctttacctttagcagctatgcgatgcattgggtgcgtcaggcgccaggtaagggcttagagtgggtggcggttatctcttatgacggtagcaacaagtactacgccgatagcgttaaaggccgcttcacgattagccgcgacaacagcaaaaataccttatacttacagatgaattctttacgcgccgaggatacggccgtttattattgtgcccgtgttccacgcggtggtgacaagtttgatccatggggtcagtggggtcagggcaccttagttacggtgagcagcggcggttcttctcgctctagctcttctggcggcggcggtagcggcggtggcggcgaaatcgtgctgacgcagagcccggcgaccctgagcctgtctccaggcgagcgcgcgaccctgtcttgccgcgcctctcagtctgtttctagctcttatttagcgtggtaccagcagaagccaggccaagcgccacgcctgctgatttacggcgcctcttctcgtgccacgggtatcccggcgcgtttcagcggcagcggtagcggcaccgacttcaccctgaccatctctcgtctggagccagaggatttcgccgtgtactattgtcaggtgtggcacagcggtgacaaccgttgggtgtttggtcaaggtacgaaagttgaaattaaa

SEQ ID NO: 897 - DNA, 738 bp, synthetic construct
  source 1..738: mol_type = other DNA
caggtgcagttagttgaaagcggcggtggtgtggtgcaaccgggtcgtagcttacgtttatcttgcgcggcctctggctttacctttagcagctatgcgatgcattgggtgcgtcaggcgccaggtaagggcttagagtgggtggcggttatctcttatgacggtagcaacaagtactacgccgatagcgttaaaggccgcttcacgattagccgcgacaacagcaaaaataccttatacttacagatgaattctttacgcgccgaggatacggccgtttattattgtgcccgtgttcgcggtggttggtctgactactggggccagtggggtcaaggcacgctggtgaccgtttcttctggcggcagcagccgctcttcttcttctggcggtggtggcagcggcggtggcggcgagattgtgctgacgcagagcccagcgaccctgagcctgagcccgggcgagcgcgcgacgttaagctgccgtgccagccaatctgttagctcttcttacctggcctggtatcaacagaagccgggccaagccccgcgcctgttaatctatggcgcgtctagccgcgccacgggcatcccagcccgctttagcggctctggcagcggcacggattttaccttaacgattagccgtttagagccggaagacttcgccgtgtactactgccaacaggcctatagcccaccgatcacgttcggccagggcacgaaggttgagattaaa

SEQ ID NO: 898 - DNA, 750 bp, synthetic construct
  source 1..750: mol_type = other DNA
caggtgcagttagttgaaagcggcggtggtgtggtgcaaccgggtcgtagcttacgtttatcttgcgcggcctctggctttacctttagcagctatgcgatgcattgggtgcgtcaggcgccaggtaagggcttagagtgggtggcggttatctcttatgacggtagcaacaagtactacgccgatagcgttaaaggccgcttcacgattagccgcgacaacagcaaaaataccttatacttacagatgaattctttacgcgccgaggatacggccgtttattattgtgcccgtgtttctcacggttaccgctctatggataattggggtcaatggggccaaggcaccctggttacggttagcagcggcggctcttctcgctcttctagctctggtggcggcggctctggcggcggtggcgaaattgttctgacccaaagcccggcgaccctgagcctgagcccaggtgaacgcgccaccctgagctgtcgtgcctctcaaagcgtttcttctagctacctggcctggtatcaacagaaaccaggtcaggccccgcgcttactgatttatggtgcgtcttctcgcgcgacgggtatcccagcgcgtttttctggcagcggctctggcaccgatttcacgctgaccatttctcgcctggaaccagaggactttgccgtttattactgccaacagcgttctaatggttggccaccatggacctttggccaaggtacgaaggtggagattaaa

SEQ ID NO: 899 - DNA, 759 bp, synthetic construct
  source 1..759: mol_type = other DNA
caggtgcagttagttgaaagcggcggtggtgtggtgcaaccgggtcgtagcttacgtttatcttgcgcggcctctggctttacctttagcagctatgcgatgcattgggtgcgtcaggcgccaggtaagggcttagagtgggtggcggttatctcttatgacggtagcaacaagtactacgccgatagcgttaaaggccgcttcacgattagccgcgacaacagcaaaaataccttatacttacagatgaattctttacgcgccgaggatacggccgtttattattgtgcccgttaccgccgccgcggtgacttaacccgtcgctacccgttcgatatttggggccaatggggtcaaggcaccctggtgacggtttcttctggtggctcttctcgtagcagctctagcggcggtggcggcagcggtggcggcggtgaaattgtgctgacccagagcccggccacgctgtctttaagcccgggcgagcgtgccacgttaagctgtcgcgccagccaaagcgttagctctagctatttagcctggtatcaacagaagccaggccaggcgccacgtttattaatctatggtgcctcttctcgtgcgaccggtattccggcgcgctttagcggctctggtagcggcaccgacttcaccctgacgatctctcgtttagagccggaggatttcgcggtgtactattgtcaaacgagcggcaccggtatcccagtttttggtcagggcaccaaggttgagattaaa

SEQ ID NO: 900 - DNA, 747 bp, synthetic construct
  source 1..747: mol_type = other DNA
caggtgcagttagttgaaagcggcggtggtgtggtgcaaccgggtcgtagcttacgtttatcttgcgcggcctctggctttacctttagcagctatgcgatgcattgggtgcgtcaggcgccaggtaagggcttagagtgggtggcggttatctcttatgacggtagcaacaagtactacgccgatagcgttaaaggccgcttcacgattagccgcgacaacagcaaaaataccttatacttacagatgaattctttacgcgccgaggatacggccgtttattattgtgcccgttactacgacccaacgggttacctgaccgactactggggccaatggggccagggcacgttagttaccgtgagcagcggtggttcttctcgcagctcttctagcggcggcggtggcagcggtggcggcggcgagattgtgttaacccagagcccggcgaccctgagcttatctccgggtgagcgtgcgaccttaagctgtcgcgccagccaatctgttagctctagctacctggcctggtatcagcaaaagccgggtcaggccccacgtctgctgatctatggtgcctctagccgcgccacgggtattccggcgcgctttagcggctctggcagcggcacggactttaccctgacgatcagccgtttagagccagaagacttcgcggtttattactgccagcaatataactctacgccgctgaccttcggtcaaggtaccaaggtggaaattaaa

SEQ ID NO: 901 - DNA, 747 bp, synthetic construct
  source 1..747: mol_type = other DNA
caggtgcagttagttgaaagcggcggtggtgtggtgcaaccgggtcgtagcttacgtttatcttgcgcggcctctggctttacctttagcagctatgcgatgcattgggtgcgtcaggcgccaggtaagggcttagagtgggtggcggttatctcttatgacggtagcaacaagtactacgccgatagcgttaaaggccgcttcacgattagccgcgacaacagcaaaaataccttatacttacagatgaattctttacgcgccgaggatacggccgtttattattgtgccagcgacggtgccaagtactacttaagctattggggtcaatggggccaaggcaccctggttacggttagcagcggcggctcttctcgctcttctagctctggtggcggcggctctggcggcggtggcgaaattgttctgacccaaagcccggcgaccctgagcctgagcccaggtgaacgcgccaccctgagctgtcgtgcctctcaaagcgtttcttctagctacctggcctggtatcaacagaaaccaggtcaggccccgcgcttactgatttatggtgcgtcttctcgcgcgacgggtatcccagcgcgtttttctggcagcggctctggcaccgatttcacgctgaccatttctcgcctggaaccagaggactttgccgtttattactgctctagctatacgagctcttctacgctggtggtgttcggtcaaggtaccaaggtggaaattaaa

SEQ ID NO: 902 - DNA, 747 bp, synthetic construct
  source 1..747: mol_type = other DNA
caggtgcagttagttgaaagcggcggtggtgtggtgcaaccgggtcgtagcttacgtttatcttgcgcggcctctggctttacctttagcagctatgcgatgcattgggtgcgtcaggcgccaggtaagggcttagagtgggtggcggttatctcttatgacggtagcaacaagtactacgccgatagcgttaaaggccgcttcacgattagccgcgacaacagcaaaaataccttatacttacagatgaattctttacgcgccgaggatacggccgtttattattgtgccagcggtggtttatacaagtctggtcagtttgactcttggggccaatggggccagggcacgttagttaccgtgagcagcggtggttcttctcgcagctcttctagcggcggcggtggcagcggtggcggcggcgagattgtgttaacccagagcccggcgaccctgagcttatctccgggtgagcgtgcgaccttaagctgtcgcgccagccaatctgttagctctagctacctggcctggtatcagcaaaagccgggtcaggccccacgtctgctgatctatggtgcctctagccgcgccacgggtattccggcgcgctttagcggctctggcagcggcacggactttaccctgacgatcagccgtttagagccagaagacttcgcggtttattactgccagcaatattactctatcccgcgtaccttcggtcaaggtaccaaggtggaaattaaa

SEQ ID NO: 903 - DNA, 753 bp, synthetic construct
  source 1..753: mol_type = other DNA
caggtgcagttagttgaaagcggcggtggtgtggtgcaaccgggtcgtagcttacgtttatcttgcgcggcctctggctttacctttagcagctatgcgatgcattgggtgcgtcaggcgccaggtaagggcttagagtgggtggcggttatctcttatgacggtagcaacaagtactacgccgatagcgttaaaggccgcttcacgattagccgcgacaacagcaaaaataccttatacttacagatgaattctttacgcgccgaggatacggccgtttattattgtgccagccacgactcttctggttactacgattggattgactactggggccaatggggccagggcacgttagttaccgtgagcagcggtggttcttctcgcagctcttctagcggcggcggtggcagcggtggcggcggcgagattgtgttaacccagagcccggcgaccctgagcttatctccgggtgagcgtgcgaccttaagctgtcgcgccagccaatctgttagctctagctacctggcctggtatcagcaaaagccgggtcaggccccacgtctgctgatctatggtgcctctagccgcgccacgggtattccggcgcgctttagcggctctggcagcggcacggactttaccctgacgatcagccgtttagagccagaagacttcgcggtttattactgccaggcctgggattcttctacgtataccgtgttcggtcaaggtaccaaggtggaaattaaa

SEQ ID NO: 904 - DNA, 753 bp, synthetic construct
  source 1..753: mol_type = other DNA
caggtgcagttagttgaaagcggcggtggtgtggtgcaaccgggtcgtagcttacgtttatcttgcgcggcctctggctttacctttagcagctatgcgatgcattgggtgcgtcaggcgccaggtaagggcttagagtgggtggcggttatctcttatgacggtagcaacaagtactacgccgatagcgttaaaggccgcttcacgattagccgcgacaacagcaaaaataccttatacttacagatgaattctttacgcgccgaggatacggccgtttattattgtgccagccacgactcttctggttactacgattggattgactactggggccaatggggccagggcacgttagttaccgtgagcagcggtggttcttctcgcagctcttctagcggcggcggtggcagcggtggcggcggcgagattgtgttaacccagagcccggcgaccctgagcttatctccgggtgagcgtgcgaccttaagctgtcgcgccagccaatctgttagctctagctacctggcctggtatcagcaaaagccgggtcaggccccacgtctgctgatctatggtgcctctagccgcgccacgggtattccggcgcgctttagcggctctggcagcggcacggactttaccctgacgatcagccgtttagagccagaagacttcgcggtttattactgccagatctgggattcttcttcttatgtggtgttcggtcaaggtaccaaggtggaaattaaa

SEQ ID NO: 905 - DNA, 753 bp, synthetic construct
  source 1..753: mol_type = other DNA
caggtgcagttagttgaaagcggcggtggtgtggtgcaaccgggtcgtagcttacgtttatcttgcgcggcctctggctttacctttagcagctatgcgatgcattgggtgcgtcaggcgccaggtaagggcttagagtgggtggcggttatctcttatgacggtagcaacaagtactacgccgatagcgttaaaggccgcttcacgattagccgcgacaacagcaaaaataccttatacttacagatgaattctttacgcgccgaggatacggccgtttattattgtgccagcaagacgccagagtgggagggtgccccgtttcaatggggtcagtggggtcagggcaccttagttacggtgagcagcggcggttcttctcgctctagctcttctggcggcggcggtagcggcggtggcggcgaaatcgtgctgacgcagagcccggcgaccctgagcctgtctccaggcgagcgcgcgaccctgtcttgccgcgcctctcagtctgtttctagctcttatttagcgtggtaccagcagaagccaggccaagcgccacgcctgctgatttacggcgcctcttctcgtgccacgggtatcccggcgcgtttcagcggcagcggtagcggcaccgacttcaccctgaccatctctcgtctggagccagaggatttcgccgtgtactattgtcaggtgtgggactattctcgcaacaattgggtgtttggtcaaggtacgaaagttgaaattaaa

SEQ ID NO: 906 - DNA, 747 bp, synthetic construct
  source 1..747: mol_type = other DNA
caggtgcagttagttgaaagcggcggtggtgtggtgcaaccgggtcgtagcttacgtttatcttgcgcggcctctggctttacctttagcagctatgcgatgcattgggtgcgtcaggcgccaggtaagggcttagagtgggtggcggttatctcttatgacggtagcaacaagtactacgccgatagcgttaaaggccgcttcacgattagccgcgacaacagcaaaaataccttatacttacagatgaattctttacgcgccgaggatacggccgtttattattgtgccagccaatactcttctggttggccaccagattattggggtcaatggggccaaggcaccctggttacggttagcagcggcggctcttctcgctcttctagctctggtggcggcggctctggcggcggtggcgaaattgttctgacccaaagcccggcgaccctgagcctgagcccaggtgaacgcgccaccctgagctgtcgtgcctctcaaagcgtttcttctagctacctggcctggtatcaacagaaaccaggtcaggccccgcgcttactgatttatggtgcgtcttctcgcgcgacgggtatcccagcgcgtttttctggcagcggctctggcaccgatttcacgctgaccatttctcgcctggaaccagaggactttgccgtttattactgcatgcaagcgattccacatttacgcttaacctttggccaaggtacgaaggtggagattaaa

SEQ ID NO: 907 - DNA, 750 bp, synthetic construct
  source 1..750: mol_type = other DNA
caggtgcagttagttgaaagcggcggtggtgtggtgcaaccgggtcgtagcttacgtttatcttgcgcggcctctggctttacctttagcagctatgcgatgcattgggtgcgtcaggcgccaggtaagggcttagagtgggtggcggttatctcttatgacggtagcaacaagtactacgccgatagcgttaaaggccgcttcacgattagccgcgacaacagcaaaaataccttatacttacagatgaattctttacgcgccgaggatacggccgtttattattgtgccagccgcggtcgcggtcaacaagttggcaaaaactggggtcagtggggtcagggcaccttagttacggtgagcagcggcggttcttctcgctctagctcttctggcggcggcggtagcggcggtggcggcgaaatcgtgctgacgcagagcccggcgaccctgagcctgtctccaggcgagcgcgcgaccctgtcttgccgcgcctctcagtctgtttctagctcttatttagcgtggtaccagcagaagccaggccaagcgccacgcctgctgatttacggcgcctcttctcgtgccacgggtatcccggcgcgtttcagcggcagcggtagcggcaccgacttcaccctgaccatctctcgtctggagccagaggatttcgccgtgtactattgtcaggtgtgggactattctcgcaacaattgggtgtttggtcaaggtacgaaagttgaaattaaa

SEQ ID NO: 908 - DNA, 765 bp, synthetic construct
  source 1..765: mol_type = other DNA
caggtgcagttagttgaaagcggcggtggtgtggtgcaaccgggtcgtagcttacgtttatcttgcgcggcctctggctttacctttagcagctatgcgatgcattgggtgcgtcaggcgccaggtaagggcttagagtgggtggcggttatctcttatgacggtagcaacaagtactacgccgatagcgttaaaggccgcttcacgattagccgcgacaacagcaaaaataccttatacttacagatgaattctttacgcgccgaggatacggccgtttattattgtgccagctggcgcaagggttactactacggtcgtgatggttacccggacaattggggccagtggggtcaaggtaccctggtgaccgtttcttctggtggtagctctcgcagcagcagctctggcggcggtggcagcggcggtggcggcgagattgtgctgacccagagcccggcgacgttaagcttatctccgggcgaacgcgcgacgttatcttgccgcgcctctcagtctgtgtctagctcttatctggcctggtaccagcaaaaaccaggtcaggcgccgcgcctgttaatctacggcgcctcttctcgcgcgaccggcatcccggcgcgtttcagcggcagcggttctggcaccgatttcacgctgaccatctctcgcctggagccagaagactttgccgtgtattactgccaagtttggcacagcggcgataaccgctgggttttcggccaaggcaccaaagttgagatcaaa

SEQ ID NO: 909 - DNA, 750 bp, synthetic construct
  source 1..750: mol_type = other DNA
caggtgcagttagttgaaagcggcggtggtgtggtgcaaccgggtcgtagcttacgtttatcttgcgcggcctctggctttacctttagcagctatgcgatgcattgggtgcgtcaggcgccaggtaagggcttagagtgggtggcggttatctcttatgacggtagcaacaagtactacgccgatagcgttaaaggccgcttcacgattagccgcgacaacagcaaaaataccttatacttacagatgaattctttacgcgccgaggatacggccgtttattattgtgccaccgagcaaccaaacggtggttggccactggattcttggggtcagtggggtcagggcaccttagttacggtgagcagcggcggttcttctcgctctagctcttctggcggcggcggtagcggcggtggcggcgaaatcgtgctgacgcagagcccggcgaccctgagcctgtctccaggcgagcgcgcgaccctgtcttgccgcgcctctcagtctgtttctagctcttatttagcgtggtaccagcagaagccaggccaagcgccacgcctgctgatttacggcgcctcttctcgtgccacgggtatcccggcgcgtttcagcggcagcggtagcggcaccgacttcaccctgaccatctctcgtctggagccagaggatttcgccgtgtactattgtagcagctacacctcttcttctaccctggcgttcggtcaaggtaccaaggtggaaattaaa

SEQ ID NO: 910 - DNA, 756 bp, synthetic construct
  source 1..756: mol_type = other DNA
caggtgcagttagttgaaagcggcggtggtgtggtgcaaccgggtcgtagcttacgtttatcttgcgcggcctctggctttacctttagcagctatgcgatgcattgggtgcgtcaggcgccaggtaagggcttagagtgggtggcggttatctcttatgacggtagcaacaagtactacgccgatagcgttaaaggccgcttcacgattagccgcgacaacagcaaaaataccttatacttacagatgaattctttacgcgccgaggatacggccgtttattattgtgccaccggttcttaccgcaagtacgccggcggcttcgactattggggtcagtggggccagggtacgttagtgaccgtgagctctggtggttcttctcgttcttctagcagcggcggtggcggctctggcggcggcggtgaaattgttctgacccagagcccggcgaccctgtctttaagcccaggtgaacgtgcgacgctgtcttgtcgcgcgtctcaatctgtgtctagctcttatttagcgtggtatcaacaaaaaccaggccaagccccgcgtctgttaatttacggtgccagctctcgcgccacgggcattccggcccgttttagcggtagcggcagcggtacggattttaccttaacgattagccgcttagagccggaggactttgccgtgtactattgccaagtgtgggactctggtagcgatcattgggttttcggtcaaggcacgaaagtggaaatcaaa

SEQ ID NO: 911 - DNA, 756 bp, synthetic construct
  source 1..756: mol_type = other DNA
caggtgcagttagttgaaagcggcggtggtgtggtgcaaccgggtcgtagcttacgtttatcttgcgcggcctctggctttacctttagcagctatgcgatgcattgggtgcgtcaggcgccaggtaagggcttagagtgggtggcggttatctcttatgacggtagcaacaagtactacgccgatagcgttaaaggccgcttcacgattagccgcgacaacagcaaaaataccttatacttacagatgaattctttacgcgccgaggatacggccgtttattattgtgccaccggttcttaccgcaagtacgccggcggcttcgactattggggtcagtggggccagggtacgttagtgaccgtgagctctggtggttcttctcgttcttctagcagcggcggtggcggctctggcggcggcggtgaaattgttctgacccagagcccggcgaccctgtctttaagcccaggtgaacgtgcgacgctgtcttgtcgcgcgtctcaatctgtgtctagctcttatttagcgtggtatcaacaaaaaccaggccaagccccgcgtctgttaatttacggtgccagctctcgcgccacgggcattccggcccgttttagcggtagcggcagcggtacggattttaccttaacgattagccgcttagagccggaggactttgccgtgtactattgccaagtgtgggactcttacaatgatcatgttgttttcggtcagggtaccaaagtggagatcaaa

SEQ ID NO: 912 - DNA, 753 bp, synthetic construct
  source 1..753: mol_type = other DNA
caggtgcagttagttgaaagcggcggtggtgtggtgcaaccgggtcgtagcttacgtttatcttgcgcggcctctggctttacctttagcagctatgcgatgcattgggtgcgtcaggcgccaggtaagggcttagagtgggtggcggttatctcttatgacggtagcaacaagtactacgccgatagcgttaaaggccgcttcacgattagccgcgacaacagcaaaaataccttatacttacagatgaattctttacgcgccgaggatacggccgtttattattgtgccaccggttcttaccgcaagtacgccggcggcttcgactattggggtcagtggggccagggtacgttagtgaccgtgagctctggtggttcttctcgttcttctagcagcggcggtggcggctctggcggcggcggtgaaattgttctgacccagagcccggcgaccctgtctttaagcccaggtgaacgtgcgacgctgtcttgtcgcgcgtctcaatctgtgtctagctcttatttagcgtggtatcaacaaaaaccaggccaagccccgcgtctgttaatttacggtgccagctctcgcgccacgggcattccggcccgttttagcggtagcggcagcggtacggattttaccttaacgattagccgcttagagccggaggactttgccgtgtactattgctctagctacgcctctagcggcacctgggttttcggtcaaggcacgaaagtggaaatcaaa

SEQ ID NO: 913 - DNA, 744 bp, synthetic construct
  source 1..744: mol_type = other DNA
caggtgcagttagttgaaagcggcggtggtgtggtgcaaccgggtcgtagcttacgtttatcttgcgcggcctctggctttacctttagcagctatgcgatgcattgggtgcgtcaggcgccaggtaagggcttagagtgggtggcggttatctcttatgacggtagcaacaagtactacgccgatagcgttaaaggccgcttcacgattagccgcgacaacagcaaaaataccttatacttacagatgaattctttacgcgccgaggatacggccgtttattattgtgcctattctggtgtttacgagcgcttctttgattactggggtcagtggggtcagggcaccttagttacggtgagcagcggcggttcttctcgctctagctcttctggcggcggcggtagcggcggtggcggcgaaatcgtgctgacgcagagcccggcgaccctgagcctgtctccaggcgagcgcgcgaccctgtcttgccgcgcctctcagtctgtttctagctcttatttagcgtggtaccagcagaagccaggccaagcgccacgcctgctgatttacggcgcctcttctcgtgccacgggtatcccggcgcgtttcagcggcagcggtagcggcaccgacttcaccctgaccatctctcgtctggagccagaggatttcgccgtgtactattgtcagcagacgcagacgttcccaccgacctttggtcaaggtacgaaagttgaaattaaa

SEQ ID NO: 914 - DNA, 744 bp, synthetic construct
  source 1..744: mol_type = other DNA
caggtgcagttagttgaaagcggcggtggtgtggtgcaaccgggtcgtagcttacgtttatcttgcgcggcctctggctttacctttagcagctatgcgatgcattgggtgcgtcaggcgccaggtaagggcttagagtgggtggcggttatctcttatgacggtagcaacaagtactacgccgatagcgttaaaggccgcttcacgattagccgcgacaacagcaaaaataccttatacttacagatgaattctttacgcgccgaggatacggccgtttattattgtggtaaaggtggtttctggcacccatcttactggggccagtggggtcaaggcacgctggtgaccgtttcttctggcggcagcagccgctcttcttcttctggcggtggtggcagcggcggtggcggcgagattgtgctgacgcagagcccagcgaccctgagcctgagcccgggcgagcgcgcgacgttaagctgccgtgccagccaatctgttagctcttcttacctggcctggtatcaacagaagccgggccaagccccgcgcctgttaatctatggcgcgtctagccgcgccacgggcatcccagcccgctttagcggctctggcagcggcacggattttaccttaacgattagccgtttagagccggaagacttcgccgtgtactactgccaagtgtgggacagccgttctgatcactgggttttcggccagggcacgaaggttgagattaaa

SEQ ID NO: 915 - DNA, 741 bp, synthetic construct
  source 1..741: mol_type = other DNA
caggtgcagttagttgaaagcggcggtggtgtggtgcaaccgggtcgtagcttacgtttatcttgcgcggcctctggctttacctttagcagctatgcgatgcattgggtgcgtcaggcgccaggtaagggcttagagtgggtggcggttatctcttatgacggtagcaacaagtactacgccgatagcgttaaaggccgcttcacgattagccgcgacaacagcaaaaataccttatacttacagatgaattctttacgcgccgaggatacggccgtttattattgtggtcgtgccgactacccattcgacatctggggccagtggggtcaaggcacgctggtgaccgtttcttctggcggcagcagccgctcttcttcttctggcggtggtggcagcggcggtggcggcgagattgtgctgacgcagagcccagcgaccctgagcctgagcccgggcgagcgcgcgacgttaagctgccgtgccagccaatctgttagctcttcttacctggcctggtatcaacagaagccgggccaagccccgcgcctgttaatctatggcgcgtctagccgcgccacgggcatcccagcccgctttagcggctctggcagcggcacggattttaccttaacgattagccgtttagagccggaagacttcgccgtgtactactgccaagtgtgggacagcagcggtgatgactgggttttcggccagggcacgaaggttgagattaaa

SEQ ID NO: 916 - DNA, 771 bp, synthetic construct
  source 1..771: mol_type = other DNA
caggtgcagttagttgaaagcggcggtggtgtggtgcaaccgggtcgtagcttacgtttatcttgcgcggcctctggctttacctttagcagctatgcgatgcattgggtgcgtcaggcgccaggtaagggcttagagtgggtggcggttatctcttatgacggtagcaacaagtactacgccgatagcgttaaaggccgcttcacgattagccgcgacaacagcaaaaataccttatacttacagatgaattctttacgcgccgaggatacggccgtttattattgttctcgtgagcgcccagttggttcttactatagcggtttaggctacccgaaagattcttggggtcaatggggccagggcaccttagttacggtttctagcggtggtagcagccgttctagcagctctggcggcggcggtagcggcggtggcggcgaaattgtgctgacccagtctccagcgacgttaagcctgagcccaggcgagcgcgccaccttatcttgtcgtgccagccaaagcgttagcagctcttacctggcctggtatcaacaaaaaccgggccaagcgccacgcttactgatctacggtgccagcagccgtgccaccggcattccagcgcgtttttctggtagcggcagcggtacggattttacgttaacgatttctcgcctggagccggaggattttgccgtgtactactgtcgtgtgtgggattcttctaacgaccattgggtttttggccagggtacgaaggtggagatcaaa

SEQ ID NO: 917 - DNA, 759 bp, synthetic construct
  source 1..759: mol_type = other DNA
caggtgcagttagttgaaagcggcggtggtgtggtgcaaccgggtcgtagcttacgtttatcttgcgcggcctctggctttacctttagcagctatgcgatgcattgggtgcgtcaggcgccaggtaagggcttagagtgggtggcggttatctcttatgacggtagcaacaagtactacgccgatagcgttaaaggccgcttcacgattagccgcgacaacagcaaaaataccttatacttacagatgaattctttacgcgccgaggatacggccgtttattattgttctcgtaagtactaccacccaaactacggctattcttctgataactggggccagtggggccaaggtacgctggtgaccgtgtcttctggtggttctagccgctctagcagcagcggtggcggcggtagcggcggcggtggcgaaatcgtgctgacccagagcccggcgaccttatctctgtctccaggcgaacgtgccaccttatcttgtcgtgcctctcaaagcgttagctctagctacctggcgtggtaccaacagaagccgggtcaagcgccgcgtttactgatctacggtgcgtcttctcgcgccaccggcattccagcgcgtttttctggcagcggctctggtaccgattttacgttaaccatttctcgcttagaaccagaggatttcgcggtttattattgtcaggtttgggactacagccgtaataactgggttttcggtcagggtaccaaagtggagatcaaa

SEQ ID NO: 918 - DNA, 738 bp, synthetic construct
  source 1..738: mol_type = other DNA
caggtgcagttagttgaaagcggcggtggtgtggtgcaaccgggtcgtagcttacgtttatcttgcgcggcctctggctttacctttagcagctatgcgatgcattgggtgcgtcaggcgccaggtaagggcttagagtgggtggcggttatctcttatgacggtagcaacaagtactacgccgatagcgttaaaggccgcttcacgattagccgcgacaacagcaaaaataccttatacttacagatgaattctttacgcgccgaggatacggccgtttattattgtacgcgtgaccactggtactctttagacgcctggggccagtggggtcaaggcacgctggtgaccgtttcttctggcggcagcagccgctcttcttcttctggcggtggtggcagcggcggtggcggcgagattgtgctgacgcagagcccagcgaccctgagcctgagcccgggcgagcgcgcgacgttaagctgccgtgccagccaatctgttagctcttcttacctggcctggtatcaacagaagccgggccaagccccgcgcctgttaatctatggcgcgtctagccgcgccacgggcatcccagcccgctttagcggctctggcagcggcacggattttaccttaacgattagccgtttagagccggaagacttcgccgtgtactactgccaacaggaggatagcccaccgatcacgttcggccagggcacgaaggttgagattaaa

SEQ ID NO: 919 - DNA, 762 bp, synthetic construct
  source 1..762: mol_type = other DNA
caggtgcagttagttgaaagcggcggtggtgtggtgcaaccgggtcgtagcttacgtttatcttgcgcggcctctggctttacctttagcagctatgcgatgcattgggtgcgtcaggcgccaggtaagggcttagagtgggtggcggttatctcttatgacggtagcaacaagtactacgccgatagcgttaaaggccgcttcacgattagccgcgacaacagcaaaaataccttatacttacagatgaattctttacgcgccgaggatacggccgtttattattgtacgcgtgagaacgcctacgtttctttcgatgcggttgactttggtatggatcattggggccaatggggtcaaggcaccctggtgacggtttcttctggtggctcttctcgtagcagctctagcggcggtggcggcagcggtggcggcggtgaaattgtgctgacccagagcccggccacgctgtctttaagcccgggcgagcgtgccacgttaagctgtcgcgccagccaaagcgttagctctagctatttagcctggtatcaacagaagccaggccaggcgccacgtttattaatctatggtgcctcttctcgtgcgaccggtattccggcgcgctttagcggctctggtagcggcaccgacttcaccctgacgatctctcgtttagagccggaggatttcgcggtgtactattgtcaacaaagctatagcccaccaatcacgtttggtcagggcaccaaggttgagattaaa

SEQ ID NO: 920 - DNA, 741 bp, synthetic construct
  source 1..741: mol_type = other DNA
caggtgcagttagttgaaagcggcggtggtgtggtgcaaccgggtcgtagcttacgtttatcttgcgcggcctctggctttacctttagcagctatgcgatgcattgggtgcgtcaggcgccaggtaagggcttagagtgggtggcggttatctcttatgacggtagcaacaagtactacgccgatagcgttaaaggccgcttcacgattagccgcgacaacagcaaaaataccttatacttacagatgaattctttacgcgccgaggatacggccgtttattattgtacgcgtggtggtgcccgctacgccttaaatagctggggtcaatggggccaaggcaccctggttacggttagcagcggcggctcttctcgctcttctagctctggtggcggcggctctggcggcggtggcgaaattgttctgacccaaagcccggcgaccctgagcctgagcccaggtgaacgcgccaccctgagctgtcgtgcctctcaaagcgtttcttctagctacctggcctggtatcaacagaaaccaggtcaggccccgcgcttactgatttatggtgcgtcttctcgcgcgacgggtatcccagcgcgtttttctggcagcggctctggcaccgatttcacgctgaccatttctcgcctggaaccagaggactttgccgtttattactgccaacagtattacagcccaccaatcacctttggccaaggtacgaaggtggagattaaa

SEQ ID NO: 921 - DNA, 732 bp, synthetic construct
  source 1..732: mol_type = other DNA
caggtgcagttagttgaaagcggcggtggtgtggtgcaaccgggtcgtagcttacgtttatcttgcgcggcctctggctttacctttagcagctatgcgatgcattgggtgcgtcaggcgccaggtaagggcttagagtgggtggcggttatctcttatgacggtagcaacaagtactacgccgatagcgttaaaggccgcttcacgattagccgcgacaacagcaaaaataccttatacttacagatgaattctttacgcgccgaggatacggccgtttattattgtacgcgtggtggtgccacggactactggggtcagtggggccaaggtaccttagtgaccgtgtcttctggtggcagcagccgttcttcttcttctggtggcggtggtagcggcggcggtggcgaaatcgtgctgacccaaagcccggccaccctgagcctgagcccgggcgaacgcgccaccttatcttgccgtgcgtctcagtctgtttctagctcttacttagcgtggtaccagcaaaaaccaggccaggccccacgtttactgatctacggcgcgagctctcgtgccacgggtattccagcccgcttcagcggcagcggtagcggcaccgactttaccctgacgatcagccgtctggagccagaagatttcgccgtttattactgtcagcaatatggtagcagcccaaaaacgttcggtcagggcaccaaggttgagatcaaa

SEQ ID NO: 922 - DNA, 786 bp, synthetic construct
  source 1..786: mol_type = other DNA
caggtgcagttagttgaaagcggcggtggtgtggtgcaaccgggtcgtagcttacgtttatcttgcgcggcctctggctttacctttagcagctatgcgatgcattgggtgcgtcaggcgccaggtaagggcttagagtgggtggcggttatctcttatgacggtagcaacaagtactacgccgatagcgttaaaggccgcttcacgattagccgcgacaacagcaaaaataccttatacttacagatgaattctttacgcgccgaggatacggccgtttattattgtacgcgtcacgtttcttggtacggtgactctgcgatttactactattactatggccagccatacggtatggattattggggccagtggggtcaaggtacgttagtgacggttagcagcggcggtagcagccgcagcagcagctctggcggcggtggcagcggcggcggcggcgaaattgttttaacccaatctccggcgaccttaagcttatctccaggcgagcgcgccaccttaagctgtcgtgccagccagtctgttagctctagctacttagcgtggtatcagcaaaaaccaggtcaagcgccacgcttattaatttatggcgccagcagccgtgccaccggcattccagcccgttttagcggttctggcagcggtacggactttacgttaaccatcagccgcctggaaccagaagacttcgccgtgtattattgtcaagcctgggacagcaacccgatggtggtgttcggtcaaggcacgaaggtggagattaaa

SEQ ID NO: 923 - DNA, 786 bp, synthetic construct
  source 1..786: mol_type = other DNA
caggtgcagttagttgaaagcggcggtggtgtggtgcaaccgggtcgtagcttacgtttatcttgcgcggcctctggctttacctttagcagctatgcgatgcattgggtgcgtcaggcgccaggtaagggcttagagtgggtggcggttatctcttatgacggtagcaacaagtactacgccgatagcgttaaaggccgcttcacgattagccgcgacaacagcaaaaataccttatacttacagatgaattctttacgcgccgaggatacggccgtttattattgtacgcgtcacgtttcttggtacggtgactctgcgatttactactattactatggccagccatacggtatggattattggggccagtggggtcaaggtacgttagtgacggttagcagcggcggtagcagccgcagcagcagctctggcggcggtggcagcggcggcggcggcgaaattgttttaacccaatctccggcgaccttaagcttatctccaggcgagcgcgccaccttaagctgtcgtgccagccagtctgttagctctagctacttagcgtggtatcagcaaaaaccaggtcaagcgccacgcttattaatttatggcgccagcagccgtgccaccggcattccagcccgttttagcggttctggcagcggtacggactttacgttaaccatcagccgcctggaaccagaagacttcgccgtgtattattgtcaaggttgggacagctctgcgcatgtggttttcggtcagggtacgaaagttgaaattaaa

SEQ ID NO: 924 - DNA, 750 bp, synthetic construct
  source 1..750: mol_type = other DNA
caggtgcagttagttgaaagcggcggtggtgtggtgcaaccgggtcgtagcttacgtttatcttgcgcggcctctggctttacctttagcagctatgcgatgcattgggtgcgtcaggcgccaggtaagggcttagagtgggtggcggttatctcttatgacggtagcaacaagtactacgccgatagcgttaaaggccgcttcacgattagccgcgacaacagcaaaaataccttatacttacagatgaattctttacgcgccgaggatacggccgtttattattgtacgcgtcaatgggaggcccaagccccattcgatttttggggtcaatggggccaaggcaccctggttacggttagcagcggcggctcttctcgctcttctagctctggtggcggcggctctggcggcggtggcgaaattgttctgacccaaagcccggcgaccctgagcctgagcccaggtgaacgcgccaccctgagctgtcgtgcctctcaaagcgtttcttctagctacctggcctggtatcaacagaaaccaggtcaggccccgcgcttactgatttatggtgcgtcttctcgcgcgacgggtatcccagcgcgtttttctggcagcggctctggcaccgatttcacgctgaccatttctcgcctggaaccagaggactttgccgtttattactgcggtacctggaattctagcttatctgccggcgtgtttggtcaaggtacgaaagttgaaattaaa

SEQ ID NO: 925 - DNA, 750 bp, synthetic construct
  source 1..750: mol_type = other DNA
caggtgcagttagttgaaagcggcggtggtgtggtgcaaccgggtcgtagcttacgtttatcttgcgcggcctctggctttacctttagcagctatgcgatgcattgggtgcgtcaggcgccaggtaagggcttagagtgggtggcggttatctcttatgacggtagcaacaagtactacgccgatagcgttaaaggccgcttcacgattagccgcgacaacagcaaaaataccttatacttacagatgaattctttacgcgccgaggatacggccgtttattattgtgttaaaaaggttgccggttcttacccatatgatatctggggtcagtggggtcagggcaccttagttacggtgagcagcggcggttcttctcgctctagctcttctggcggcggcggtagcggcggtggcggcgaaatcgtgctgacgcagagcccggcgaccctgagcctgtctccaggcgagcgcgcgaccctgtcttgccgcgcctctcagtctgtttctagctcttatttagcgtggtaccagcagaagccaggccaagcgccacgcctgctgatttacggcgcctcttctcgtgccacgggtatcccggcgcgtttcagcggcagcggtagcggcaccgacttcaccctgaccatctctcgtctggagccagaggatttcgccgtgtactattgtcaggcgtgggacagctctacggaccatgtgctgttcggtcaaggtaccaaggtggaaattaaa

SEQ ID NO: 926 - DNA, 741 bp, synthetic construct
  source 1..741: mol_type = other DNA
caggtgcagttagttgaaagcggcggtggtgtggtgcaaccgggtcgtagcttacgtttatcttgcgcggcctctggctttacctttagcagctatgcgatgcattgggtgcgtcaggcgccaggtaagggcttagagtgggtggcggttatctcttatgacggtagcaacaagtactacgccgatagcgttaaaggccgcttcacgattagccgcgacaacagcaaaaataccttatacttacagatgaattctttacgcgccgaggatacggccgtttattattgtgttaataacaacacgggttgggccttcgacatttggggccaatggggtcagggtaccctggtgacggtttctagcggcggcagctctcgctcttcttctagcggtggtggcggcagcggtggcggcggtgaaattgtgttaacccagtctccggcgaccctgagcctgagcccgggtgagcgtgccacgctgagctgccgcgcgtctcaatctgtgtcttcttcttatttagcgtggtaccagcaaaaaccgggtcaagcgccacgtttattaatttatggcgccagctctcgcgccaccggtatcccagcccgttttagcggtagcggcagcggtaccgattttacgttaaccattagccgcttagaaccggaggacttcgcggtttactattgtcagcaaagctattctccgccaccaacgtttggccagggtacgaaggttgaaatcaaa

SEQ ID NO: 927 - DNA, 750 bp, synthetic construct
  source 1..750: mol_type = other DNA
caggtgcagttagttgaaagcggcggtggtgtggtgcaaccgggtcgtagcttacgtttatcttgcgcggcctctggctttacctttagcagctatgcgatgcattgggtgcgtcaggcgccaggtaagggcttagagtgggtggcggttatctcttatgacggtagcaacaagtactacgccgatagcgttaaaggccgcttcacgattagccgcgacaacagcaaaaataccttatacttacagatgaattctttacgcgccgaggatacggccgtttattattgtgttcgtgccttctcttactcttggccattcgatcattggggtcaatggggccaaggcaccctggttacggttagcagcggcggctcttctcgctcttctagctctggtggcggcggctctggcggcggtggcgaaattgttctgacccaaagcccggcgaccctgagcctgagcccaggtgaacgcgccaccctgagctgtcgtgcctctcaaagcgtttcttctagctacctggcctggtatcaacagaaaccaggtcaggccccgcgcttactgatttatggtgcgtcttctcgcgcgacgggtatcccagcgcgtttttctggcagcggctctggcaccgatttcacgctgaccatttctcgcctggaaccagaggactttgccgtttattactgcgccagctgggatgacagcttaaacggtcgtgtgtttggtcaaggtacgaaagttgaaattaaa

SEQ ID NO: 928 - DNA, 753 bp, synthetic construct
  source 1..753: mol_type = other DNA
caggtgcagttagttgaaagcggcggtggtgtggtgcaaccgggtcgtagcttacgtttatcttgcgcggcctctggctttacctttagcagctatgcgatgcattgggtgcgtcaggcgccaggtaagggcttagagtgggtggcggttatctcttatgacggtagcaacaagtactacgccgatagcgttaaaggccgcttcacgattagccgcgacaacagcaaaaataccttatacttacagatgaattctttacgcgccgaggatacggccgtttattattgtgttcgtgccttctcttactcttggccattcgatcattggggtcaatggggccaaggcaccctggttacggttagcagcggcggctcttctcgctcttctagctctggtggcggcggctctggcggcggtggcgaaattgttctgacccaaagcccggcgaccctgagcctgagcccaggtgaacgcgccaccctgagctgtcgtgcctctcaaagcgtttcttctagctacctggcctggtatcaacagaaaccaggtcaggccccgcgcttactgatttatggtgcgtcttctcgcgcgacgggtatcccagcgcgtttttctggcagcggctctggcaccgatttcacgctgaccatttctcgcctggaaccagaggactttgccgtttattactgcggtacctgggattctagcttatctcgcggctgggtgtttggtcaaggtacgaaagttgaaattaaa

SEQ ID NO: 929 - DNA, 744 bp, synthetic construct
  source 1..744: mol_type = other DNA
caggtgcagttagttgaaagcggcggtggtgtggtgcaaccgggtcgtagcttacgtttatcttgcgcggcctctggctttacctttagcagctatgcgatgcattgggtgcgtcaggcgccaggtaagggcttagagtgggtggcggttatctcttatgacggtagcaacaagtactacgccgatagcgttaaaggccgcttcacgattagccgcgacaacagcaaaaataccttatacttacagatgaattctttacgcgccgaggatacggccgtttattattgtgttcgtgccttctcttactcttggccattcgatcattggggtcaatggggccaaggcaccctggttacggttagcagcggcggctcttctcgctcttctagctctggtggcggcggctctggcggcggtggcgaaattgttctgacccaaagcccggcgaccctgagcctgagcccaggtgaacgcgccaccctgagctgtcgtgcctctcaaagcgtttcttctagctacctggcctggtatcaacagaaaccaggtcaggccccgcgcttactgatttatggtgcgtcttctcgcgcgacgggtatcccagcgcgtttttctggcagcggctctggcaccgatttcacgctgaccatttctcgcctggaaccagaggactttgccgtttattactgcttacagtattacaccccagcccgcgtgtttggccaaggtacgaaggtggagattaaa

SEQ ID NO: 930 - DNA, 744 bp, synthetic construct
  source 1..744: mol_type = other DNA
caggtgcagttagttgaaagcggcggtggtgtggtgcaaccgggtcgtagcttacgtttatcttgcgcggcctctggctttacctttagcagctatgcgatgcattgggtgcgtcaggcgccaggtaagggcttagagtgggtggcggttatctcttatgacggtagcaacaagtactacgccgatagcgttaaaggccgcttcacgattagccgcgacaacagcaaaaataccttatacttacagatgaattctttacgcgccgaggatacggccgtttattattgtgttcgtgccttctcttactcttggccattcgatcattggggtcaatggggccaaggcaccctggttacggttagcagcggcggctcttctcgctcttctagctctggtggcggcggctctggcggcggtggcgaaattgttctgacccaaagcccggcgaccctgagcctgagcccaggtgaacgcgccaccctgagctgtcgtgcctctcaaagcgtttcttctagctacctggcctggtatcaacagaaaccaggtcaggccccgcgcttactgatttatggtgcgtcttctcgcgcgacgggtatcccagcgcgtttttctggcagcggctctggcaccgatttcacgctgaccatttctcgcctggaaccagaggactttgccgtttattactgcatgcaaggcgcgcactggccgtgggccttcggtcagggcaccaaggttgagatcaaa

SEQ ID NO: 931 - DNA, 744 bp, synthetic construct
  source 1..744: mol_type = other DNA
caggtgcagttagttgaaagcggcggtggtgtggtgcaaccgggtcgtagcttacgtttatcttgcgcggcctctggctttacctttagcagctatgcgatgcattgggtgcgtcaggcgccaggtaagggcttagagtgggtggcggttatctcttatgacggtagcaacaagtactacgccgatagcgttaaaggccgcttcacgattagccgcgacaacagcaaaaataccttatacttacagatgaattctttacgcgccgaggatacggccgtttattattgtgttcgtgccttctcttactcttggccattcgatcattggggtcaatggggccaaggcaccctggttacggttagcagcggcggctcttctcgctcttctagctctggtggcggcggctctggcggcggtggcgaaattgttctgacccaaagcccggcgaccctgagcctgagcccaggtgaacgcgccaccctgagctgtcgtgcctctcaaagcgtttcttctagctacctggcctggtatcaacagaaaccaggtcaggccccgcgcttactgatttatggtgcgtcttctcgcgcgacgggtatcccagcgcgtttttctggcagcggctctggcaccgatttcacgctgaccatttctcgcctggaaccagaggactttgccgtttattactgccaacaggcgaacagcttcccacgcacctttggccaaggtacgaaggtggagattaaa

SEQ ID NO: 932 - DNA, 744 bp, synthetic construct
  source 1..744: mol_type = other DNA
caggtgcagttagttgaaagcggcggtggtgtggtgcaaccgggtcgtagcttacgtttatcttgcgcggcctctggctttacctttagcagctatgcgatgcattgggtgcgtcaggcgccaggtaagggcttagagtgggtggcggttatctcttatgacggtagcaacaagtactacgccgatagcgttaaaggccgcttcacgattagccgcgacaacagcaaaaataccttatacttacagatgaattctttacgcgccgaggatacggccgtttattattgtgttcgtgccttctcttactcttggccattcgatcattggggtcaatggggccaaggcaccctggttacggttagcagcggcggctcttctcgctcttctagctctggtggcggcggctctggcggcggtggcgaaattgttctgacccaaagcccggcgaccctgagcctgagcccaggtgaacgcgccaccctgagctgtcgtgcctctcaaagcgtttcttctagctacctggcctggtatcaacagaaaccaggtcaggccccgcgcttactgatttatggtgcgtcttctcgcgcgacgggtatcccagcgcgtttttctggcagcggctctggcaccgatttcacgctgaccatttctcgcctggaaccagaggactttgccgtttattactgccaacagagctacagcacgccatggacgtttggccagggtacgaaggttgaaatcaaa

SEQ ID NO: 933 - DNA, 744 bp, synthetic construct
  source 1..744: mol_type = other DNA
caggtgcagttagttgaaagcggcggtggtgtggtgcaaccgggtcgtagcttacgtttatcttgcgcggcctctggctttacctttagcagctatgcgatgcattgggtgcgtcaggcgccaggtaagggcttagagtgggtggcggttatctcttatgacggtagcaacaagtactacgccgatagcgttaaaggccgcttcacgattagccgcgacaacagcaaaaataccttatacttacagatgaattctttacgcgccgaggatacggccgtttattattgtgttcgtgccttctcttactcttggccattcgatcattggggtcaatggggccaaggcaccctggttacggttagcagcggcggctcttctcgctcttctagctctggtggcggcggctctggcggcggtggcgaaattgttctgacccaaagcccggcgaccctgagcctgagcccaggtgaacgcgccaccctgagctgtcgtgcctctcaaagcgtttcttctagctacctggcctggtatcaacagaaaccaggtcaggccccgcgcttactgatttatggtgcgtcttctcgcgcgacgggtatcccagcgcgtttttctggcagcggctctggcaccgatttcacgctgaccatttctcgcctggaaccagaggactttgccgtttattactgccaacagtatggtcgttctatgtggacgttcggccagggcacgaaggttgagattaaa

SEQ ID NO: 934 - DNA, 744 bp, synthetic construct
  source 1..744: mol_type = other DNA
caggtgcagttagttgaaagcggcggtggtgtggtgcaaccgggtcgtagcttacgtttatcttgcgcggcctctggctttacctttagcagctatgcgatgcattgggtgcgtcaggcgccaggtaagggcttagagtgggtggcggttatctcttatgacggtagcaacaagtactacgccgatagcgttaaaggccgcttcacgattagccgcgacaacagcaaaaataccttatacttacagatgaattctttacgcgccgaggatacggccgtttattattgtgttcgtgccttctcttactcttggccattcgatcattggggtcaatggggccaaggcaccctggttacggttagcagcggcggctcttctcgctcttctagctctggtggcggcggctctggcggcggtggcgaaattgttctgacccaaagcccggcgaccctgagcctgagcccaggtgaacgcgccaccctgagctgtcgtgcctctcaaagcgtttcttctagctacctggcctggtatcaacagaaaccaggtcaggccccgcgcttactgatttatggtgcgtcttctcgcgcgacgggtatcccagcgcgtttttctggcagcggctctggcaccgatttcacgctgaccatttctcgcctggaaccagaggactttgccgtttattactgccaacagtataacaattacccatggacgtttggccagggtacgaaggttgaaatcaaa

SEQ ID NO: 935 - DNA, 747 bp, synthetic construct
  source 1..747: mol_type = other DNA
caggtgcagttagttgaaagcggcggtggtgtggtgcaaccgggtcgtagcttacgtttatcttgcgcggcctctggctttacctttagcagctatgcgatgcattgggtgcgtcaggcgccaggtaagggcttagagtgggtggcggttatctcttatgacggtagcaacaagtactacgccgatagcgttaaaggccgcttcacgattagccgcgacaacagcaaaaataccttatacttacagatgaattctttacgcgccgaggatacggccgtttattattgtgttcgtgccttctcttactcttggccattcgatcattggggtcaatggggccaaggcaccctggttacggttagcagcggcggctcttctcgctcttctagctctggtggcggcggctctggcggcggtggcgaaattgttctgacccaaagcccggcgaccctgagcctgagcccaggtgaacgcgccaccctgagctgtcgtgcctctcaaagcgtttcttctagctacctggcctggtatcaacagaaaccaggtcaggccccgcgcttactgatttatggtgcgtcttctcgcgcgacgggtatcccagcgcgtttttctggcagcggctctggcaccgatttcacgctgaccatttctcgcctggaaccagaggactttgccgtttattactgccaacagtattacagcacgccacaatggacctttggccaaggtacgaaggtggagattaaa

SEQ ID NO: 936 - DNA, 741 bp, synthetic construct
  source 1..741: mol_type = other DNA
caggtgcagttagttgaaagcggcggtggtgtggtgcaaccgggtcgtagcttacgtttatcttgcgcggcctctggctttacctttagcagctatgcgatgcattgggtgcgtcaggcgccaggtaagggcttagagtgggtggcggttatctcttatgacggtagcaacaagtactacgccgatagcgttaaaggccgcttcacgattagccgcgacaacagcaaaaataccttatacttacagatgaattctttacgcgccgaggatacggccgtttattattgtgttcgtgccttctcttactcttggccattcgatcattggggtcaatggggccaaggcaccctggttacggttagcagcggcggctcttctcgctcttctagctctggtggcggcggctctggcggcggtggcgaaattgttctgacccaaagcccggcgaccctgagcctgagcccaggtgaacgcgccaccctgagctgtcgtgcctctcaaagcgtttcttctagctacctggcctggtatcaacagaaaccaggtcaggccccgcgcttactgatttatggtgcgtcttctcgcgcgacgggtatcccagcgcgtttttctggcagcggctctggcaccgatttcacgctgaccatttctcgcctggaaccagaggactttgccgtttattactgccaacagtattacagcacgccaacgtttggccagggtacgaaggttgaaatcaaa

SEQ ID NO: 937 - DNA, 750 bp, synthetic construct
  source 1..750: mol_type = other DNA
caggtgcagttagttgaaagcggcggtggtgtggtgcaaccgggtcgtagcttacgtttatcttgcgcggcctctggctttacctttagcagctatgcgatgcattgggtgcgtcaggcgccaggtaagggcttagagtgggtggcggttatctcttatgacggtagcaacaagtactacgccgatagcgttaaaggccgcttcacgattagccgcgacaacagcaaaaataccttatacttacagatgaattctttacgcgccgaggatacggccgtttattattgtgttcgtgccttctcttactcttggccattcgatcattggggtcaatggggccaaggcaccctggttacggttagcagcggcggctcttctcgctcttctagctctggtggcggcggctctggcggcggtggcgaaattgttctgacccaaagcccggcgaccctgagcctgagcccaggtgaacgcgccaccctgagctgtcgtgcctctcaaagcgtttcttctagctacctggcctggtatcaacagaaaccaggtcaggccccgcgcttactgatttatggtgcgtcttctcgcgcgacgggtatcccagcgcgtttttctggcagcggctctggcaccgatttcacgctgaccatttctcgcctggaaccagaggactttgccgtttattactgccaagtgtgggattctagctctgaccactgggtgtttggccaaggtacgaaggtggagattaaa

SEQ ID NO: 938 - DNA, 744 bp, synthetic construct
  source 1..744: mol_type = other DNA
caggtgcagttagttgaaagcggcggtggtgtggtgcaaccgggtcgtagcttacgtttatcttgcgcggcctctggctttacctttagcagctatgcgatgcattgggtgcgtcaggcgccaggtaagggcttagagtgggtggcggttatctcttatgacggtagcaacaagtactacgccgatagcgttaaaggccgcttcacgattagccgcgacaacagcaaaaataccttatacttacagatgaattctttacgcgccgaggatacggccgtttattattgtgttcgtgccttctcttactcttggccattcgatcattggggtcaatggggccaaggcaccctggttacggttagcagcggcggctcttctcgctcttctagctctggtggcggcggctctggcggcggtggcgaaattgttctgacccaaagcccggcgaccctgagcctgagcccaggtgaacgcgccaccctgagctgtcgtgcctctcaaagcgtttcttctagctacctggcctggtatcaacagaaaccaggtcaggccccgcgcttactgatttatggtgcgtcttctcgcgcgacgggtatcccagcgcgtttttctggcagcggctctggcaccgatttcacgctgaccatttctcgcctggaaccagaggactttgccgtttattactgctctagctatgccacctctcgcccaaaatttggccaaggtacgaaggtggagattaaa

SEQ ID NO: 939 - DNA, 750 bp, synthetic construct
  source 1..750: mol_type = other DNA
caggtgcagttagttgaaagcggcggtggtgtggtgcaaccgggtcgtagcttacgtttatcttgcgcggcctctggctttacctttagcagctatgcgatgcattgggtgcgtcaggcgccaggtaagggcttagagtgggtggcggttatctcttatgacggtagcaacaagtactacgccgatagcgttaaaggccgcttcacgattagccgcgacaacagcaaaaataccttatacttacagatgaattctttacgcgccgaggatacggccgtttattattgtgttcgtgccttctcttactcttggccattcgatcattggggtcaatggggccaaggcaccctggttacggttagcagcggcggctcttctcgctcttctagctctggtggcggcggctctggcggcggtggcgaaattgttctgacccaaagcccggcgaccctgagcctgagcccaggtgaacgcgccaccctgagctgtcgtgcctctcaaagcgtttcttctagctacctggcctggtatcaacagaaaccaggtcaggccccgcgcttactgatttatggtgcgtcttctcgcgcgacgggtatcccagcgcgtttttctggcagcggctctggcaccgatttcacgctgaccatttctcgcctggaaccagaggactttgccgtttattactgctctagctatacgagctcttctacgccgtatgtgttcggtcaaggtaccaaggtggaaattaaa

SEQ ID NO: 940 - DNA, 744 bp, synthetic construct
  source 1..744: mol_type = other DNA
caggtgcagttagttgaaagcggcggtggtgtggtgcaaccgggtcgtagcttacgtttatcttgcgcggcctctggctttacctttagcagctatgcgatgcattgggtgcgtcaggcgccaggtaagggcttagagtgggtggcggttatctcttatgacggtagcaacaagtactacgccgatagcgttaaaggccgcttcacgattagccgcgacaacagcaaaaataccttatacttacagatgaattctttacgcgccgaggatacggccgtttattattgtgttcgtgactctacgtactacggtttagatatttggggtcaatggggccaaggcaccctggttacggttagcagcggcggctcttctcgctcttctagctctggtggcggcggctctggcggcggtggcgaaattgttctgacccaaagcccggcgaccctgagcctgagcccaggtgaacgcgccaccctgagctgtcgtgcctctcaaagcgtttcttctagctacctggcctggtatcaacagaaaccaggtcaggccccgcgcttactgatttatggtgcgtcttctcgcgcgacgggtatcccagcgcgtttttctggcagcggctctggcaccgatttcacgctgaccatttctcgcctggaaccagaggactttgccgtttattactgctctagctatacgaccgccgccacgctggtgtttggtcaaggtacgaaagttgaaattaaa

SEQ ID NO: 941 - DNA, 759 bp, synthetic construct
  source 1..759: mol_type = other DNA
caggtgcagttagttgaaagcggcggtggtgtggtgcaaccgggtcgtagcttacgtttatcttgcgcggcctctggctttacctttagcagctatgcgatgcattgggtgcgtcaggcgccaggtaagggcttagagtgggtggcggttatctcttatgacggtagcaacaagtactacgccgatagcgttaaaggccgcttcacgattagccgcgacaacagcaaaaataccttatacttacagatgaattctttacgcgccgaggatacggccgtttattattgtgttcgtgactctgttggttaccgcgaccagccgggttactatttagattattggggccaatggggtcaaggcaccctggtgacggtttcttctggtggctcttctcgtagcagctctagcggcggtggcggcagcggtggcggcggtgaaattgtgctgacccagagcccggccacgctgtctttaagcccgggcgagcgtgccacgttaagctgtcgcgccagccaaagcgttagctctagctatttagcctggtatcaacagaagccaggccaggcgccacgtttattaatctatggtgcctcttctcgtgcgaccggtattccggcgcgctttagcggctctggtagcggcaccgacttcaccctgacgatctctcgtttagagccggaggatttcgcggtgtactattgtcaagcctgggatagccgtacgggtgttttcggccaaggcaccaaagttgagatcaaa

SEQ ID NO: 942 - DNA, 750 bp, synthetic construct
  source 1..750: mol_type = other DNA
caggtgcagttagttgaaagcggcggtggtgtggtgcaaccgggtcgtagcttacgtttatcttgcgcggcctctggctttacctttagcagctatgcgatgcattgggtgcgtcaggcgccaggtaagggcttagagtgggtggcggttatctcttatgacggtagcaacaagtactacgccgatagcgttaaaggccgcttcacgattagccgcgacaacagcaaaaataccttatacttacagatgaattctttacgcgccgaggatacggccgtttattattgtgttcgtgagggtttctctggtacgtggacggcgtttgacatctggggccaatggggccagggcacgttagttaccgtgagcagcggtggttcttctcgcagctcttctagcggcggcggtggcagcggtggcggcggcgagattgtgttaacccagagcccggcgaccctgagcttatctccgggtgagcgtgcgaccttaagctgtcgcgccagccaatctgttagctctagctacctggcctggtatcagcaaaagccgggtcaggccccacgtctgctgatctatggtgcctctagccgcgccacgggtattccggcgcgctttagcggctctggcagcggcacggactttaccctgacgatcagccgtttagagccagaagacttcgcggtttattactgccagcaaagctactctccaccgccgaccttcggtcaaggtaccaaggtggaaattaaa

SEQ ID NO: 943 - DNA, 735 bp, synthetic construct
  source 1..735: mol_type = other DNA
caggtgcagttagttgaaagcggcggtggtgtggtgcaaccgggtcgtagcttacgtttatcttgcgcggcctctggctttacctttagcagctatgcgatgcattgggtgcgtcaggcgccaggtaagggcttagagtgggtggcggttatctcttatgacggtagcaacaagtactacgccgatagcgttaaaggccgcttcacgattagccgcgacaacagcaaaaataccttatacttacagatgaattctttacgcgccgaggatacggccgtttattattgtgttcgtcactctacggttccagactactggggccagtggggtcaaggcacgctggtgaccgtttcttctggcggcagcagccgctcttcttcttctggcggtggtggcagcggcggtggcggcgagattgtgctgacgcagagcccagcgaccctgagcctgagcccgggcgagcgcgcgacgttaagctgccgtgccagccaatctgttagctcttcttacctggcctggtatcaacagaagccgggccaagccccgcgcctgttaatctatggcgcgtctagccgcgccacgggcatcccagcccgctttagcggctctggcagcggcacggattttaccttaacgattagccgtttagagccggaagacttcgccgtgtactactgccaacagtacgatagcccaccgttaacgttcggccagggcacgaaggttgagattaaa

SEQ ID NO: 944 - DNA, 750 bp, synthetic construct
  source 1..750: mol_type = other DNA
caggtgcagttagttgaaagcggcggtggtgtggtgcaaccgggtcgtagcttacgtttatcttgcgcggcctctggctttacctttagcagctatgcgatgcattgggtgcgtcaggcgccaggtaagggcttagagtgggtggcggttatctcttatgacggtagcaacaagtactacgccgatagcgttaaaggccgcttcacgattagccgcgacaacagcaaaaataccttatacttacagatgaattctttacgcgccgaggatacggccgtttattattgtgccaaagaccacacgatgttaggttctttcgattattggggtcaatggggccaaggcaccctggttacggttagcagcggcggctcttctcgctcttctagctctggtggcggcggctctggcggcggtggcgaaattgttctgacccaaagcccggcgaccctgagcctgagcccaggtgaacgcgccaccctgagctgtcgtgcctctcaaagcgtttcttctagctacctggcctggtatcaacagaaaccaggtcaggccccgcgcttactgatttatggtgcgtcttctcgcgcgacgggtatcccagcgcgtttttctggcagcggctctggcaccgatttcacgctgaccatttctcgcctggaaccagaggactttgccgtttattactgccaagcgtgggattctagctctacggacgtggtgtttggtcaaggtacgaaagttgaaattaaa

SEQ ID NO: 945 - DNA, 744 bp, synthetic construct
  source 1..744: mol_type = other DNA
caggtgcagttagttgaaagcggcggtggtgtggtgcaaccgggtcgtagcttacgtttatcttgcgcggcctctggctttacctttagcagctatgcgatgcattgggtgcgtcaggcgccaggtaagggcttagagtgggtggcggttatctcttatgacggtagcaacaagtactacgccgatagcgttaaaggccgcttcacgattagccgcgacaacagcaaaaataccttatacttacagatgaattctttacgcgccgaggatacggccgtttattattgtgccaaagaccacacgatgttaggttctttcgattattggggtcaatggggccaaggcaccctggttacggttagcagcggcggctcttctcgctcttctagctctggtggcggcggctctggcggcggtggcgaaattgttctgacccaaagcccggcgaccctgagcctgagcccaggtgaacgcgccaccctgagctgtcgtgcctctcaaagcgtttcttctagctacctggcctggtatcaacagaaaccaggtcaggccccgcgcttactgatttatggtgcgtcttctcgcgcgacgggtatcccagcgcgtttttctggcagcggctctggcaccgatttcacgctgaccatttctcgcctggaaccagaggactttgccgtttattactgccaacagcgtgccaattggccattaacgtttggccagggtacgaaggttgaaatcaaa

SEQ ID NO: 946 - DNA, 741 bp, synthetic construct
  source 1..741: mol_type = other DNA
caggtgcagttagttgaaagcggcggtggtgtggtgcaaccgggtcgtagcttacgtttatcttgcgcggcctctggctttacctttagcagctatgcgatgcattgggtgcgtcaggcgccaggtaagggcttagagtgggtggcggttatctcttatgacggtagcaacaagtactacgccgatagcgttaaaggccgcttcacgattagccgcgacaacagcaaaaataccttatacttacagatgaattctttacgcgccgaggatacggccgtttattattgtgccaaagacttaatctacacggcccaagattattggggtcaatggggccaaggcaccctggttacggttagcagcggcggctcttctcgctcttctagctctggtggcggcggctctggcggcggtggcgaaattgttctgacccaaagcccggcgaccctgagcctgagcccaggtgaacgcgccaccctgagctgtcgtgcctctcaaagcgtttcttctagctacctggcctggtatcaacagaaaccaggtcaggccccgcgcttactgatttatggtgcgtcttctcgcgcgacgggtatcccagcgcgtttttctggcagcggctctggcaccgatttcacgctgaccatttctcgcctggaaccagaggactttgccgtttattactgccaacaggtgggtagcacgccatacacctttggccaaggtacgaaggtggagattaaa

SEQ ID NO: 947 - DNA, 753 bp, synthetic construct
  source 1..753: mol_type = other DNA
caggtgcagttagttgaaagcggcggtggtgtggtgcaaccgggtcgtagcttacgtttatcttgcgcggcctctggctttacctttagcagctatgcgatgcattgggtgcgtcaggcgccaggtaagggcttagagtgggtggcggttatctcttatgacggtagcaacaagtactacgccgatagcgttaaaggccgcttcacgattagccgcgacaacagcaaaaataccttatacttacagatgaattctttacgcgccgaggatacggccgtttattattgtgccaaagacttaatctacacggcccaagattattggggtcaatggggccaaggcaccctggttacggttagcagcggcggctcttctcgctcttctagctctggtggcggcggctctggcggcggtggcgaaattgttctgacccaaagcccggcgaccctgagcctgagcccaggtgaacgcgccaccctgagctgtcgtgcctctcaaagcgtttcttctagctacctggcctggtatcaacagaaaccaggtcaggccccgcgcttactgatttatggtgcgtcttctcgcgcgacgggtatcccagcgcgtttttctggcagcggctctggcaccgatttcacgctgaccatttctcgcctggaaccagaggactttgccgtttattactgccaaagctatgacagctctttattaagcccgctggttgttttcggtcagggtaccaaagtggagatcaaa

SEQ ID NO: 948 - DNA, 744 bp, synthetic construct
  source 1..744: mol_type = other DNA
caggtgcagttagttgaaagcggcggtggtgtggtgcaaccgggtcgtagcttacgtttatcttgcgcggcctctggctttacctttagcagctatgcgatgcattgggtgcgtcaggcgccaggtaagggcttagagtgggtggcggttatctcttatgacggtagcaacaagtactacgccgatagcgttaaaggccgcttcacgattagccgcgacaacagcaaaaataccttatacttacagatgaattctttacgcgccgaggatacggccgtttattattgtgccaaagacttaatctacacggcccaagattattggggtcaatggggccaaggcaccctggttacggttagcagcggcggctcttctcgctcttctagctctggtggcggcggctctggcggcggtggcgaaattgttctgacccaaagcccggcgaccctgagcctgagcccaggtgaacgcgccaccctgagctgtcgtgcctctcaaagcgtttcttctagctacctggcctggtatcaacagaaaccaggtcaggccccgcgcttactgatttatggtgcgtcttctcgcgcgacgggtatcccagcgcgtttttctggcagcggctctggcaccgatttcacgctgaccatttctcgcctggaaccagaggactttgccgtttattactgctctagctatacgagctcttctaacgcggtgtttggtcaaggtacgaaagttgaaattaaa

SEQ ID NO: 949 - DNA, 762 bp, synthetic construct
  source 1..762: mol_type = other DNA
caggtgcagttagttgaaagcggcggtggtgtggtgcaaccgggtcgtagcttacgtttatcttgcgcggcctctggctttacctttagcagctatgcgatgcattgggtgcgtcaggcgccaggtaagggcttagagtgggtggcggttatctcttatgacggtagcaacaagtactacgccgatagcgttaaaggccgcttcacgattagccgcgacaacagcaaaaataccttatacttacagatgaattctttacgcgccgaggatacggccgtttattattgtgccaaagactggggttggtaccgcggttacggtcatgcgggtgccgtggacatttggggccagtggggtcaaggtaccctggtgaccgtttcttctggtggtagctctcgcagcagcagctctggcggcggtggcagcggcggtggcggcgagattgtgctgacccagagcccggcgacgttaagcttatctccgggcgaacgcgcgacgttatcttgccgcgcctctcagtctgtgtctagctcttatctggcctggtaccagcaaaaaccaggtcaggcgccgcgcctgttaatctacggcgcctcttctcgcgcgaccggcatcccggcgcgtttcagcggcagcggttctggcaccgatttcacgctgaccatctctcgcctggagccagaagactttgccgtgtattactgccaccaatctagccgttttccaatcacgttcggccaaggcaccaaagttgagatcaaa

SEQ ID NO: 950 - DNA, 768 bp, synthetic construct
  source 1..768: mol_type = other DNA
caggtgcagttagttgaaagcggcggtggtgtggtgcaaccgggtcgtagcttacgtttatcttgcgcggcctctggctttacctttagcagctatgcgatgcattgggtgcgtcaggcgccaggtaagggcttagagtgggtggcggttatctcttatgacggtagcaacaagtactacgccgatagcgttaaaggccgcttcacgattagccgcgacaacagcaaaaataccttatacttacagatgaattctttacgcgccgaggatacggccgtttattattgtgccaaagactggggttggtaccgcggttacggtcatgcgggtgccgtggacatttggggccagtggggtcaaggtaccctggtgaccgtttcttctggtggtagctctcgcagcagcagctctggcggcggtggcagcggcggtggcggcgagattgtgctgacccagagcccggcgacgttaagcttatctccgggcgaacgcgcgacgttatcttgccgcgcctctcagtctgtgtctagctcttatctggcctggtaccagcaaaaaccaggtcaggcgccgcgcctgttaatctacggcgcctcttctcgcgcgaccggcatcccggcgcgtttcagcggcagcggttctggcaccgatttcacgctgaccatctctcgcctggagccagaagactttgccgtgtattactgccaacaatactatagcaccccaccaatgtactcttttggtcagggcaccaaggttgagattaaa

SEQ ID NO: 951 - DNA, 771 bp, synthetic construct
  source 1..771: mol_type = other DNA
caggtgcagttagttgaaagcggcggtggtgtggtgcaaccgggtcgtagcttacgtttatcttgcgcggcctctggctttacctttagcagctatgcgatgcattgggtgcgtcaggcgccaggtaagggcttagagtgggtggcggttatctcttatgacggtagcaacaagtactacgccgatagcgttaaaggccgcttcacgattagccgcgacaacagcaaaaataccttatacttacagatgaattctttacgcgccgaggatacggccgtttattattgtgccaaagactggggttggtaccgcggttacggtcatgcgggtgccgtggacatttggggccagtggggtcaaggtaccctggtgaccgtttcttctggtggtagctctcgcagcagcagctctggcggcggtggcagcggcggtggcggcgagattgtgctgacccagagcccggcgacgttaagcttatctccgggcgaacgcgcgacgttatcttgccgcgcctctcagtctgtgtctagctcttatctggcctggtaccagcaaaaaccaggtcaggcgccgcgcctgttaatctacggcgcctcttctcgcgcgaccggcatcccggcgcgtttcagcggcagcggttctggcaccgatttcacgctgaccatctctcgcctggagccagaagactttgccgtgtattactgccaagttttagatagcagcgacgaccacccagtggtttttggccagggtacgaaggtggagatcaaa

SEQ ID NO: 952 - DNA, 750 bp, synthetic construct
  source 1..750: mol_type = other DNA
caggtgcagttagttgaaagcggcggtggtgtggtgcaaccgggtcgtagcttacgtttatcttgcgcggcctctggctttacctttagcagctatgcgatgcattgggtgcgtcaggcgccaggtaagggcttagagtgggtggcggttatctcttatgacggtagcaacaagtactacgccgatagcgttaaaggccgcttcacgattagccgcgacaacagcaaaaataccttatacttacagatgaattctttacgcgccgaggatacggccgtttattattgtgccaaagagacgacgggtatcggtgcctttgattactggggtcagtggggtcagggcaccttagttacggtgagcagcggcggttcttctcgctctagctcttctggcggcggcggtagcggcggtggcggcgaaatcgtgctgacgcagagcccggcgaccctgagcctgtctccaggcgagcgcgcgaccctgtcttgccgcgcctctcagtctgtttctagctcttatttagcgtggtaccagcagaagccaggccaagcgccacgcctgctgatttacggcgcctcttctcgtgccacgggtatcccggcgcgtttcagcggcagcggtagcggcaccgacttcaccctgaccatctctcgtctggagccagaggatttcgccgtgtactattgtgcgagctgggacgattctttatctggctgggtgtttggtcaaggtacgaaagttgaaattaaa

SEQ ID NO: 953 - DNA, 756 bp, synthetic construct
  source 1..756: mol_type = other DNA
caggtgcagttagttgaaagcggcggtggtgtggtgcaaccgggtcgtagcttacgtttatcttgcgcggcctctggctttacctttagcagctatgcgatgcattgggtgcgtcaggcgccaggtaagggcttagagtgggtggcggttatctcttatgacggtagcaacaagtactacgccgatagcgttaaaggccgcttcacgattagccgcgacaacagcaaaaataccttatacttacagatgaattctttacgcgccgaggatacggccgtttattattgtgccaaaggtggttacggtcactctggttatgcgttcgactattggggtcagtggggccagggtacgttagtgaccgtgagctctggtggttcttctcgttcttctagcagcggcggtggcggctctggcggcggcggtgaaattgttctgacccagagcccggcgaccctgtctttaagcccaggtgaacgtgcgacgctgtcttgtcgcgcgtctcaatctgtgtctagctcttatttagcgtggtatcaacaaaaaccaggccaagccccgcgtctgttaatttacggtgccagctctcgcgccacgggcattccggcccgttttagcggtagcggcagcggtacggattttaccttaacgattagccgcttagagccggaggactttgccgtgtactattgcgccgtgtgggacgactctctgagcggctacgttttcggtcagggtaccaaagtggagatcaaa

SEQ ID NO: 954 - DNA, 747 bp, synthetic construct
  source 1..747: mol_type = other DNA
caggtgcagttagttgaaagcggcggtggtgtggtgcaaccgggtcgtagcttacgtttatcttgcgcggcctctggctttacctttagcagctatgcgatgcattgggtgcgtcaggcgccaggtaagggcttagagtgggtggcggttatctcttatgacggtagcaacaagtactacgccgatagcgttaaaggccgcttcacgattagccgcgacaacagcaaaaataccttatacttacagatgaattctttacgcgccgaggatacggccgtttattattgtgccaaaggtttaatcgaccgctacacgcgtaccgactactggggccaatggggccagggcacgttagttaccgtgagcagcggtggttcttctcgcagctcttctagcggcggcggtggcagcggtggcggcggcgagattgtgttaacccagagcccggcgaccctgagcttatctccgggtgagcgtgcgaccttaagctgtcgcgccagccaatctgttagctctagctacctggcctggtatcagcaaaagccgggtcaggccccacgtctgctgatctatggtgcctctagccgcgccacgggtattccggcgcgctttagcggctctggcagcggcacggactttaccctgacgatcagccgtttagagccagaagacttcgcggtttattactgccagcaagcgaactctttcccggtgaccttcggtcaaggtaccaaggtggaaattaaa

SEQ ID NO: 955 - DNA, 774 bp, synthetic construct
  source 1..774: mol_type = other DNA
caggtgcagttagttgaaagcggcggtggtgtggtgcaaccgggtcgtagcttacgtttatcttgcgcggcctctggctttacctttagcagctatgcgatgcattgggtgcgtcaggcgccaggtaagggcttagagtgggtggcggttatctcttatgacggtagcaacaagtactacgccgatagcgttaaaggccgcttcacgattagccgcgacaacagcaaaaataccttatacttacagatgaattctttacgcgccgaggatacggccgtttattattgtgccaaatctgacgagtaccgcgccgttggcccgtacgactattggtcttatgcggcgttcgactactggggccagtggggccagggtacgttagttacggtgtcttctggcggcagctctcgtagctctagcagcggcggtggcggctctggcggcggcggcgaaattgtgctgacgcaaagcccagccaccctgagcttaagcccaggtgagcgtgccacgttaagctgtcgtgccagccaaagcgtgtcttctagctacctggcctggtaccagcagaaaccaggccaagccccacgtttattaatctacggcgcgagctctcgtgcgaccggtattccggcgcgcttcagcggcagcggttctggcaccgacttcacgctgacgatcagccgcctggagccggaagactttgccgtttactattgccagtcttggggtgacgcctattacgtgtttggccaaggtacgaaagttgagattaaa

SEQ ID NO: 956 - DNA, 750 bp, synthetic construct
  source 1..750: mol_type = other DNA
caggtgcagttagttgaaagcggcggtggtgtggtgcaaccgggtcgtagcttacgtttatcttgcgcggcctctggctttacctttagcagctatgcgatgcattgggtgcgtcaggcgccaggtaagggcttagagtgggtggcggttatctcttatgacggtagcaacaagtactacgccgatagcgttaaaggccgcttcacgattagccgcgacaacagcaaaaataccttatacttacagatgaattctttacgcgccgaggatacggccgtttattattgtgccaaagttttatctggtacgcgcgccaccctggactactggggccaatggggccagggcacgttagttaccgtgagcagcggtggttcttctcgcagctcttctagcggcggcggtggcagcggtggcggcggcgagattgtgttaacccagagcccggcgaccctgagcttatctccgggtgagcgtgcgaccttaagctgtcgcgccagccaatctgttagctctagctacctggcctggtatcagcaaaagccgggtcaggccccacgtctgctgatctatggtgcctctagccgcgccacgggtattccggcgcgctttagcggctctggcagcggcacggactttaccctgacgatcagccgtttagagccagaagacttcgcggtttattactgccaggcctgggattctacgttacatggcgtgttcggtcaaggtaccaaggtggaaattaaa

SEQ ID NO: 957 - DNA, 774 bp, synthetic construct
  source 1..774: mol_type = other DNA
caggtgcagttagttgaaagcggcggtggtgtggtgcaaccgggtcgtagcttacgtttatcttgcgcggcctctggctttacctttagcagctatgcgatgcattgggtgcgtcaggcgccaggtaagggcttagagtgggtggcggttatctcttatgacggtagcaacaagtactacgccgatagcgttaaaggccgcttcacgattagccgcgacaacagcaaaaataccttatacttacagatgaattctttacgcgccgaggatacggccgtttattattgtgcccgtgacggttacttctaccgccgcaatgtgacgacgtattacagcagctatatggactactggggtcagtggggccagggcacgttagttacggttagctctggtggcagcagccgcagcagctctagcggcggcggtggcagcggtggcggcggcgaaattgtgctgacccaatctccggccacgctgagcctgtctccgggtgagcgcgcgacgttatcttgccgcgcgtctcagtctgtgagctcttcttatttagcgtggtaccaacagaaaccgggtcaggccccacgcctgttaatctacggtgcgagcagccgcgcgaccggcatcccggcgcgtttctctggcagcggctctggtaccgatttcacgttaaccatctctcgtttagaaccagaagatttcgcggtttactactgcagcgcggacgccggtgacaataacctgctgtttggtcaaggtaccaaggttgaaatcaaa

SEQ ID NO: 958 - DNA, 738 bp, synthetic construct
  source 1..738: mol_type = other DNA
caggtgcagttagttgaaagcggcggtggtgtggtgcaaccgggtcgtagcttacgtttatcttgcgcggcctctggctttacctttagcagctatgcgatgcattgggtgcgtcaggcgccaggtaagggcttagagtgggtggcggttatctcttatgacggtagcaacaagtactacgccgatagcgttaaaggccgcttcacgattagccgcgacaacagcaaaaataccttatacttacagatgaattctttacgcgccgaggatacggccgtttattattgtgcccgtgacccaggttaccgcaacgactattggggccaatggggtcagggtaccctggtgacggtttctagcggcggcagctctcgctcttcttctagcggtggtggcggcagcggtggcggcggtgaaattgtgttaacccagtctccggcgaccctgagcctgagcccgggtgagcgtgccacgctgagctgccgcgcgtctcaatctgtgtcttcttcttatttagcgtggtaccagcaaaaaccgggtcaagcgccacgtttattaatttatggcgccagctctcgcgccaccggtatcccagcccgttttagcggtagcggcagcggtaccgattttacgttaaccattagccgcttagaaccggaggacttcgcggtttactattgtcagcaagaagattctcgtccacgcacgtttggccagggtacgaaggttgaaatcaaa

SEQ ID NO: 959 - DNA, 768 bp, synthetic construct
  source 1..768: mol_type = other DNA
caggtgcagttagttgaaagcggcggtggtgtggtgcaaccgggtcgtagcttacgtttatcttgcgcggcctctggctttacctttagcagctatgcgatgcattgggtgcgtcaggcgccaggtaagggcttagagtgggtggcggttatctcttatgacggtagcaacaagtactacgccgatagcgttaaaggccgcttcacgattagccgcgacaacagcaaaaataccttatacttacagatgaattctttacgcgccgaggatacggccgtttattattgtgcccgtgactctggtggttaccgcacgagcggcccatactttcaaggctatgcgatggacgtttggggtcagtggggccagggcacgttagttacggttagctctggtggcagcagccgcagcagctctagcggcggcggtggcagcggtggcggcggcgaaattgtgctgacccaatctccggccacgctgagcctgtctccgggtgagcgcgcgacgttatcttgccgcgcgtctcagtctgtgagctcttcttatttagcgtggtaccaacagaaaccgggtcaggccccacgcctgttaatctacggtgcgagcagccgcgcgaccggcatcccggcgcgtttctctggcagcggctctggtaccgatttcacgttaaccatctctcgtttagaaccagaagatttcgcggtttactactgccagcagtacttctctacgccgtcttttggccagggtacgaaggtggagatcaaa

SEQ ID NO: 960 - DNA, 771 bp, synthetic construct
  source 1..771: mol_type = other DNA
caggtgcagttagttgaaagcggcggtggtgtggtgcaaccgggtcgtagcttacgtttatcttgcgcggcctctggctttacctttagcagctatgcgatgcattgggtgcgtcaggcgccaggtaagggcttagagtgggtggcggttatctcttatgacggtagcaacaagtactacgccgatagcgttaaaggccgcttcacgattagccgcgacaacagcaaaaataccttatacttacagatgaattctttacgcgccgaggatacggccgtttattattgtgcccgtgacacggacggttaccgctctagcttttactctaccgcctattggatggatccgtggggtcaatggggtcagggcaccctggttacggtttcttctggcggttctagccgtagctctagcagcggtggcggcggctctggcggcggtggcgaaattgtgctgacccagagcccagccaccttatctctgagcccgggtgaacgcgccacgctgtcttgtcgcgcgtctcagtctgtgtctagcagctacttagcgtggtaccagcaaaagccgggccaggccccgcgcttattaatttacggtgcctctagccgtgcgacgggcattccggcccgttttagcggttctggcagcggcacggactttaccttaacgatcagccgcttagaaccagaagactttgcggtttattactgttctagctatacctcttcttctacgctggtttttggccagggtacgaaggtggagatcaaa

SEQ ID NO: 961 - DNA, 765 bp, synthetic construct
  source 1..765: mol_type = other DNA
caggtgcagttagttgaaagcggcggtggtgtggtgcaaccgggtcgtagcttacgtttatcttgcgcggcctctggctttacctttagcagctatgcgatgcattgggtgcgtcaggcgccaggtaagggcttagagtgggtggcggttatctcttatgacggtagcaacaagtactacgccgatagcgttaaaggccgcttcacgattagccgcgacaacagcaaaaataccttatacttacagatgaattctttacgcgccgaggatacggccgtttattattgtgcccgtttccgcatgtcttctgacgtttactataatccagcctatatggacatttggggccagtggggtcaaggtaccctggtgaccgtttcttctggtggtagctctcgcagcagcagctctggcggcggtggcagcggcggtggcggcgagattgtgctgacccagagcccggcgacgttaagcttatctccgggcgaacgcgcgacgttatcttgccgcgcctctcagtctgtgtctagctcttatctggcctggtaccagcaaaaaccaggtcaggcgccgcgcctgttaatctacggcgcctcttctcgcgcgaccggcatcccggcgcgtttcagcggcagcggttctggcaccgatttcacgctgaccatctctcgcctggagccagaagactttgccgtgtattactgctcttcttacacccataatacgacgtgggttttcggccaaggcaccaaagttgagatcaaa

SEQ ID NO: 962 - DNA, 756 bp, synthetic construct
  source 1..756: mol_type = other DNA
caggtgcagttagttgaaagcggcggtggtgtggtgcaaccgggtcgtagcttacgtttatcttgcgcggcctctggctttacctttagcagctatgcgatgcattgggtgcgtcaggcgccaggtaagggcttagagtgggtggcggttatctcttatgacggtagcaacaagtactacgccgatagcgttaaaggccgcttcacgattagccgcgacaacagcaaaaataccttatacttacagatgaattctttacgcgccgaggatacggccgtttattattgtgcccgtggtcactaccgccgcacgggtgaaggcatggactactggggccaatggggccagggcacgttagttaccgtgagcagcggtggttcttctcgcagctcttctagcggcggcggtggcagcggtggcggcggcgagattgtgttaacccagagcccggcgaccctgagcttatctccgggtgagcgtgcgaccttaagctgtcgcgccagccaatctgttagctctagctacctggcctggtatcagcaaaagccgggtcaggccccacgtctgctgatctatggtgcctctagccgcgccacgggtattccggcgcgctttagcggctctggcagcggcacggactttaccctgacgatcagccgtttagagccagaagacttcgcggtttattactgccagcaatataacaactggacgccgccgtatacgttcggtcaaggcacgaaagtggaaatcaaa

SEQ ID NO: 963 - DNA, 765 bp, synthetic construct
  source 1..765: mol_type = other DNA
caggtgcagttagttgaaagcggcggtggtgtggtgcaaccgggtcgtagcttacgtttatcttgcgcggcctctggctttacctttagcagctatgcgatgcattgggtgcgtcaggcgccaggtaagggcttagagtgggtggcggttatctcttatgacggtagcaacaagtactacgccgatagcgttaaaggccgcttcacgattagccgcgacaacagcaaaaataccttatacttacagatgaattctttacgcgccgaggatacggccgtttattattgtgcccgtggtacgaactcttaccgccgcctggtgtacgacgcgttcgatatttggggccaatggggtcaaggcaccctggtgacggtttcttctggtggctcttctcgtagcagctctagcggcggtggcggcagcggtggcggcggtgaaattgtgctgacccagagcccggccacgctgtctttaagcccgggcgagcgtgccacgttaagctgtcgcgccagccaaagcgttagctctagctatttagcctggtatcaacagaagccaggccaggcgccacgtttattaatctatggtgcctcttctcgtgcgaccggtattccggcgcgctttagcggctctggtagcggcaccgacttcaccctgacgatctctcgtttagagccggaggatttcgcggtgtactattgtcaatcttatgatagctcttcttctcacgtggtttttggccagggtacgaaggtggagatcaaa

SEQ ID NO: 964 - DNA, 750 bp, synthetic construct
  source 1..750: mol_type = other DNA
caggtgcagttagttgaaagcggcggtggtgtggtgcaaccgggtcgtagcttacgtttatcttgcgcggcctctggctttacctttagcagctatgcgatgcattgggtgcgtcaggcgccaggtaagggcttagagtgggtggcggttatctcttatgacggtagcaacaagtactacgccgatagcgttaaaggccgcttcacgattagccgcgacaacagcaaaaataccttatacttacagatgaattctttacgcgccgaggatacggccgtttattattgtgcccgttactacgacccaacgggttacctgaccgactactggggccaatggggccagggcacgttagttaccgtgagcagcggtggttcttctcgcagctcttctagcggcggcggtggcagcggtggcggcggcgagattgtgttaacccagagcccggcgaccctgagcttatctccgggtgagcgtgcgaccttaagctgtcgcgccagccaatctgttagctctagctacctggcctggtatcagcaaaagccgggtcaggccccacgtctgctgatctatggtgcctctagccgcgccacgggtattccggcgcgctttagcggctctggcagcggcacggactttaccctgacgatcagccgtttagagccagaagacttcgcggtttattactgcagctcttatacgtcttctaccacccaggttttcggtcaaggcacgaaagtggaaatcaaa

SEQ ID NO: 965 - DNA, 759 bp, synthetic construct
  source 1..759: mol_type = other DNA
caggtgcagttagttgaaagcggcggtggtgtggtgcaaccgggtcgtagcttacgtttatcttgcgcggcctctggctttacctttagcagctatgcgatgcattgggtgcgtcaggcgccaggtaagggcttagagtgggtggcggttatctcttatgacggtagcaacaagtactacgccgatagcgttaaaggccgcttcacgattagccgcgacaacagcaaaaataccttatacttacagatgaattctttacgcgccgaggatacggccgtttattattgtgccaccggtggttaccgcggtgttttagcgggcgttgcctttgacatttggggccagtggggtcaaggtaccctggtgaccgtttcttctggtggtagctctcgcagcagcagctctggcggcggtggcagcggcggtggcggcgagattgtgctgacccagagcccggcgacgttaagcttatctccgggcgaacgcgcgacgttatcttgccgcgcctctcagtctgtgtctagctcttatctggcctggtaccagcaaaaaccaggtcaggcgccgcgcctgttaatctacggcgcctcttctcgcgcgaccggcatcccggcgcgtttcagcggcagcggttctggcaccgatttcacgctgaccatctctcgcctggagccagaagactttgccgtgtattactgccaagtttgggacagcagcacctctgaggttttcggccaaggcaccaaagttgagatcaaa

SEQ ID NO: 966 - DNA, 744 bp, synthetic construct
  source 1..744: mol_type = other DNA
caggtgcagttagttgaaagcggcggtggtgtggtgcaaccgggtcgtagcttacgtttatcttgcgcggcctctggctttacctttagcagctatgcgatgcattgggtgcgtcaggcgccaggtaagggcttagagtgggtggcggttatctcttatgacggtagcaacaagtactacgccgatagcgttaaaggccgcttcacgattagccgcgacaacagcaaaaataccttatacttacagatgaattctttacgcgccgaggatacggccgtttattattgttctaaaggtcactctacgatgcaatacttcgattattggggtcaatggggccaaggcaccctggttacggttagcagcggcggctcttctcgctcttctagctctggtggcggcggctctggcggcggtggcgaaattgttctgacccaaagcccggcgaccctgagcctgagcccaggtgaacgcgccaccctgagctgtcgtgcctctcaaagcgtttcttctagctacctggcctggtatcaacagaaaccaggtcaggccccgcgcttactgatttatggtgcgtcttctcgcgcgacgggtatcccagcgcgtttttctggcagcggctctggcaccgatttcacgctgaccatttctcgcctggaaccagaggactttgccgtttattactgctctagctttgccgattctcgctacatttttggccaaggtacgaaggtggagattaaa

SEQ ID NO: 967 - DNA, 735 bp, synthetic construct
  source 1..735: mol_type = other DNA
caggtgcagttagttgaaagcggcggtggtgtggtgcaaccgggtcgtagcttacgtttatcttgcgcggcctctggctttacctttagcagctatgcgatgcattgggtgcgtcaggcgccaggtaagggcttagagtgggtggcggttatctcttatgacggtagcaacaagtactacgccgatagcgttaaaggccgcttcacgattagccgcgacaacagcaaaaataccttatacttacagatgaattctttacgcgccgaggatacggccgtttattattgtgccgatttacaatacgactactggggtcaatggggccagggtacgctggttaccgtgagctctggtggtagcagccgtagctcttcttctggtggtggcggttctggcggcggcggtgaaattgttctgacccagtctccggcgacgctgagcctgagcccgggcgaacgtgccacgctgtcttgtcgtgcgagccaaagcgtttcttctagctacttagcctggtatcaacagaagccgggtcaggcgccacgcctgttaatttacggtgcgagcagccgcgcgacgggtatcccggcccgcttctctggcagcggctctggcaccgatttcaccctgaccatctctcgtctggaaccagaggattttgccgtttactattgtgccgcgtgggacgattctagcggccgctgggtgttcggtcaaggcaccaaagttgagatcaaa

SEQ ID NO: 968 - DNA, 732 bp, synthetic construct
  source 1..732: mol_type = other DNA
caggtgcagttagttgaaagcggcggtggtgtggtgcaaccgggtcgtagcttacgtttatcttgcgcggcctctggctttacctttagcagctatgcgatgcattgggtgcgtcaggcgccaggtaagggcttagagtgggtggcggttatctcttatgacggtagcaacaagtactacgccgatagcgttaaaggccgcttcacgattagccgcgacaacagcaaaaataccttatacttacagatgaattctttacgcgccgaggatacggccgtttattattgtgccgatttacaatacgactactggggtcaatggggccagggtacgctggttaccgtgagctctggtggtagcagccgtagctcttcttctggtggtggcggttctggcggcggcggtgaaattgttctgacccagtctccggcgacgctgagcctgagcccgggcgaacgtgccacgctgtcttgtcgtgcgagccaaagcgtttcttctagctacttagcctggtatcaacagaagccgggtcaggcgccacgcctgttaatttacggtgcgagcagccgcgcgacgggtatcccggcccgcttctctggcagcggctctggcaccgatttcaccctgaccatctctcgtctggaaccagaggattttgccgtttactattgtcaacagtactattctaccaccccatatacgttcggtcagggcaccaaggttgagatcaaa

SEQ ID NO: 969 - DNA, 732 bp, synthetic construct
  source 1..732: mol_type = other DNA
caggtgcagttagttgaaagcggcggtggtgtggtgcaaccgggtcgtagcttacgtttatcttgcgcggcctctggctttacctttagcagctatgcgatgcattgggtgcgtcaggcgccaggtaagggcttagagtgggtggcggttatctcttatgacggtagcaacaagtactacgccgatagcgttaaaggccgcttcacgattagccgcgacaacagcaaaaataccttatacttacagatgaattctttacgcgccgaggatacggccgtttattattgtgccgatttacaatacgactactggggtcaatggggccagggtacgctggttaccgtgagctctggtggtagcagccgtagctcttcttctggtggtggcggttctggcggcggcggtgaaattgttctgacccagtctccggcgacgctgagcctgagcccgggcgaacgtgccacgctgtcttgtcgtgcgagccaaagcgtttcttctagctacttagcctggtatcaacagaagccgggtcaggcgccacgcctgttaatttacggtgcgagcagccgcgcgacgggtatcccggcccgcttctctggcagcggctctggcaccgatttcaccctgaccatctctcgtctggaaccagaggattttgccgtttactattgtcaagtgtgggacagctctgatggcgttgtgttcggtcaaggcaccaaagttgagatcaaa

SEQ ID NO: 970 - DNA, 756 bp, synthetic construct
  source 1..756: mol_type = other DNA
caggtgcagttagttgaaagcggcggtggtgtggtgcaaccgggtcgtagcttacgtttatcttgcgcggcctctggctttacctttagcagctatgcgatgcattgggtgcgtcaggcgccaggtaagggcttagagtgggtggcggttatctcttatgacggtagcaacaagtactacgccgatagcgttaaaggccgcttcacgattagccgcgacaacagcaaaaataccttatacttacagatgaattctttacgcgccgaggatacggccgtttattattgtgcccatcgcttatggacgacgggttggggtcgcgatgcgttcgacatttggggtcagtggggccagggtacgttagtgaccgtgagctctggtggttcttctcgttcttctagcagcggcggtggcggctctggcggcggcggtgaaattgttctgacccagagcccggcgaccctgtctttaagcccaggtgaacgtgcgacgctgtcttgtcgcgcgtctcaatctgtgtctagctcttatttagcgtggtatcaacaaaaaccaggccaagccccgcgtctgttaatttacggtgccagctctcgcgccacgggcattccggcccgttttagcggtagcggcagcggtacggattttaccttaacgattagccgcttagagccggaggactttgccgtgtactattgccaaacctggacgacgggtcattgggtgtttggtcaaggtacgaaagttgaaattaaa

SEQ ID NO: 971 - DNA, 756 bp, synthetic construct
  source 1..756: mol_type = other DNA
caggtgcagttagttgaaagcggcggtggtgtggtgcaaccgggtcgtagcttacgtttatcttgcgcggcctctggctttacctttagcagctatgcgatgcattgggtgcgtcaggcgccaggtaagggcttagagtgggtggcggttatctcttatgacggtagcaacaagtactacgccgatagcgttaaaggccgcttcacgattagccgcgacaacagcaaaaataccttatacttacagatgaattctttacgcgccgaggatacggccgtttattattgtgccaaagccatcgacgccttagccgcctttgattactggggtcagtggggtcagggcaccttagttacggtgagcagcggcggttcttctcgctctagctcttctggcggcggcggtagcggcggtggcggcgaaatcgtgctgacgcagagcccggcgaccctgagcctgtctccaggcgagcgcgcgaccctgtcttgccgcgcctctcagtctgtttctagctcttatttagcgtggtaccagcagaagccaggccaagcgccacgcctgctgatttacggcgcctcttctcgtgccacgggtatcccggcgcgtttcagcggcagcggtagcggcaccgacttcaccctgaccatctctcgtctggagccagaggatttcgccgtgtactattgtcaggtgtgggacagctcttcttctcatcatctggttgttttcggtcagggtaccaaagtggagatcaaa

SEQ ID NO: 972 - DNA, 753 bp, synthetic construct
  source 1..753: mol_type = other DNA
caggtgcagttagttgaaagcggcggtggtgtggtgcaaccgggtcgtagcttacgtttatcttgcgcggcctctggctttacctttagcagctatgcgatgcattgggtgcgtcaggcgccaggtaagggcttagagtgggtggcggttatctcttatgacggtagcaacaagtactacgccgatagcgttaaaggccgcttcacgattagccgcgacaacagcaaaaataccttatacttacagatgaattctttacgcgccgaggatacggccgtttattattgtgccaaagccatcgacgccttagccgcctttgattactggggtcagtggggtcagggcaccttagttacggtgagcagcggcggttcttctcgctctagctcttctggcggcggcggtagcggcggtggcggcgaaatcgtgctgacgcagagcccggcgaccctgagcctgtctccaggcgagcgcgcgaccctgtcttgccgcgcctctcagtctgtttctagctcttatttagcgtggtaccagcagaagccaggccaagcgccacgcctgctgatttacggcgcctcttctcgtgccacgggtatcccggcgcgtttcagcggcagcggtagcggcaccgacttcaccctgaccatctctcgtctggagccagaggatttcgccgtgtactattgtcaggtgtgggacagctcttcttctctgagcgtggttttcggtcaaggcacgaaagtggaaatcaaa

SEQ ID NO: 973 - DNA, 750 bp, synthetic construct
  source 1..750: mol_type = other DNA
caggtgcagttagttgaaagcggcggtggtgtggtgcaaccgggtcgtagcttacgtttatcttgcgcggcctctggctttacctttagcagctatgcgatgcattgggtgcgtcaggcgccaggtaagggcttagagtgggtggcggttatctcttatgacggtagcaacaagtactacgccgatagcgttaaaggccgcttcacgattagccgcgacaacagcaaaaataccttatacttacagatgaattctttacgcgccgaggatacggccgtttattattgtgccaaagacttccgcggtggtggttcttttgattactggggtcagtggggtcagggcaccttagttacggtgagcagcggcggttcttctcgctctagctcttctggcggcggcggtagcggcggtggcggcgaaatcgtgctgacgcagagcccggcgaccctgagcctgtctccaggcgagcgcgcgaccctgtcttgccgcgcctctcagtctgtttctagctcttatttagcgtggtaccagcagaagccaggccaagcgccacgcctgctgatttacggcgcctcttctcgtgccacgggtatcccggcgcgtttcagcggcagcggtagcggcaccgacttcaccctgaccatctctcgtctggagccagaggatttcgccgtgtactattgtcagcagtacggctcttcttctccgcgttggaccttcggtcaaggtaccaaggtggaaattaaa

SEQ ID NO: 974 - DNA, 750 bp, synthetic construct
  source 1..750: mol_type = other DNA
caggtgcagttagttgaaagcggcggtggtgtggtgcaaccgggtcgtagcttacgtttatcttgcgcggcctctggctttacctttagcagctatgcgatgcattgggtgcgtcaggcgccaggtaagggcttagagtgggtggcggttatctcttatgacggtagcaacaagtactacgccgatagcgttaaaggccgcttcacgattagccgcgacaacagcaaaaataccttatacttacagatgaattctttacgcgccgaggatacggccgtttattattgtgccaaagacttccgcggtggtggttcttttgattactggggtcagtggggtcagggcaccttagttacggtgagcagcggcggttcttctcgctctagctcttctggcggcggcggtagcggcggtggcggcgaaatcgtgctgacgcagagcccggcgaccctgagcctgtctccaggcgagcgcgcgaccctgtcttgccgcgcctctcagtctgtttctagctcttatttagcgtggtaccagcagaagccaggccaagcgccacgcctgctgatttacggcgcctcttctcgtgccacgggtatcccggcgcgtttcagcggcagcggtagcggcaccgacttcaccctgaccatctctcgtctggagccagaggatttcgccgtgtactattgtcagagctacgattcttctttaagcggctgggtgttcggtcaaggtaccaaggtggaaattaaa

SEQ ID NO: 975 - DNA, 744 bp, synthetic construct
  source 1..744: mol_type = other DNA
caggtgcagttagttgaaagcggcggtggtgtggtgcaaccgggtcgtagcttacgtttatcttgcgcggcctctggctttacctttagcagctatgcgatgcattgggtgcgtcaggcgccaggtaagggcttagagtgggtggcggttatctcttatgacggtagcaacaagtactacgccgatagcgttaaaggccgcttcacgattagccgcgacaacagcaaaaataccttatacttacagatgaattctttacgcgccgaggatacggccgtttattattgtgccaaagacggtggtggtgtttacacgctggattactggggtcagtggggtcagggcaccttagttacggtgagcagcggcggttcttctcgctctagctcttctggcggcggcggtagcggcggtggcggcgaaatcgtgctgacgcagagcccggcgaccctgagcctgtctccaggcgagcgcgcgaccctgtcttgccgcgcctctcagtctgtttctagctcttatttagcgtggtaccagcagaagccaggccaagcgccacgcctgctgatttacggcgcctcttctcgtgccacgggtatcccggcgcgtttcagcggcagcggtagcggcaccgacttcaccctgaccatctctcgtctggagccagaggatttcgccgtgtactattgtatgcagggcaagcagtggccaaaggcctttggccagggtacgaaggttgaaatcaaa

SEQ ID NO: 976 - DNA, 747 bp, synthetic construct
  source 1..747: mol_type = other DNA
caggtgcagttagttgaaagcggcggtggtgtggtgcaaccgggtcgtagcttacgtttatcttgcgcggcctctggctttacctttagcagctatgcgatgcattgggtgcgtcaggcgccaggtaagggcttagagtgggtggcggttatctcttatgacggtagcaacaagtactacgccgatagcgttaaaggccgcttcacgattagccgcgacaacagcaaaaataccttatacttacagatgaattctttacgcgccgaggatacggccgtttattattgtgccaaagacggtggtggtgtttacacgctggattactggggtcagtggggtcagggcaccttagttacggtgagcagcggcggttcttctcgctctagctcttctggcggcggcggtagcggcggtggcggcgaaatcgtgctgacgcagagcccggcgaccctgagcctgtctccaggcgagcgcgcgaccctgtcttgccgcgcctctcagtctgtttctagctcttatttagcgtggtaccagcagaagccaggccaagcgccacgcctgctgatttacggcgcctcttctcgtgccacgggtatcccggcgcgtttcagcggcagcggtagcggcaccgacttcaccctgaccatctctcgtctggagccagaggatttcgccgtgtactattgtcaggcgtgggacagctctacgacggtggtgtttggtcaaggtacgaaagttgaaattaaa

SEQ ID NO: 977 - DNA, 750 bp, synthetic construct
  source 1..750: mol_type = other DNA
caggtgcagttagttgaaagcggcggtggtgtggtgcaaccgggtcgtagcttacgtttatcttgcgcggcctctggctttacctttagcagctatgcgatgcattgggtgcgtcaggcgccaggtaagggcttagagtgggtggcggttatctcttatgacggtagcaacaagtactacgccgatagcgttaaaggccgcttcacgattagccgcgacaacagcaaaaataccttatacttacagatgaattctttacgcgccgaggatacggccgtttattattgtgccaaagacggtggtggtgtttacacgctggattactggggtcagtggggtcagggcaccttagttacggtgagcagcggcggttcttctcgctctagctcttctggcggcggcggtagcggcggtggcggcgaaatcgtgctgacgcagagcccggcgaccctgagcctgtctccaggcgagcgcgcgaccctgtcttgccgcgcctctcagtctgtttctagctcttatttagcgtggtaccagcagaagccaggccaagcgccacgcctgctgatttacggcgcctcttctcgtgccacgggtatcccggcgcgtttcagcggcagcggtagcggcaccgacttcaccctgaccatctctcgtctggagccagaggatttcgccgtgtactattgtagcagctacacctcttcttctattcgtcgtgttttcggtcaaggcacgaaagtggaaatcaaa

SEQ ID NO: 978 - DNA, 768 bp, synthetic construct
  source 1..768: mol_type = other DNA
caggtgcagttagttgaaagcggcggtggtgtggtgcaaccgggtcgtagcttacgtttatcttgcgcggcctctggctttacctttagcagctatgcgatgcattgggtgcgtcaggcgccaggtaagggcttagagtgggtggcggttatctcttatgacggtagcaacaagtactacgccgatagcgttaaaggccgcttcacgattagccgcgacaacagcaaaaataccttatacttacagatgaattctttacgcgccgaggatacggccgtttattattgtgccaaagacggtcactggtaccgcggttactatggctcttactatttagattattggggccaatggggtcaaggcaccctggtgacggtttcttctggtggctcttctcgtagcagctctagcggcggtggcggcagcggtggcggcggtgaaattgtgctgacccagagcccggccacgctgtctttaagcccgggcgagcgtgccacgttaagctgtcgcgccagccaaagcgttagctctagctatttagcctggtatcaacagaagccaggccaggcgccacgtttattaatctatggtgcctcttctcgtgcgaccggtattccggcgcgctttagcggctctggtagcggcaccgacttcaccctgacgatctctcgtttagagccggaggatttcgcggtgtactattgtcaacaacgtggcaattggccacgcttattcagcttcggccagggcacgaaggttgaaatcaaa

SEQ ID NO: 979 - DNA, 771 bp, synthetic construct
  source 1..771: mol_type = other DNA
caggtgcagttagttgaaagcggcggtggtgtggtgcaaccgggtcgtagcttacgtttatcttgcgcggcctctggctttacctttagcagctatgcgatgcattgggtgcgtcaggcgccaggtaagggcttagagtgggtggcggttatctcttatgacggtagcaacaagtactacgccgatagcgttaaaggccgcttcacgattagccgcgacaacagcaaaaataccttatacttacagatgaattctttacgcgccgaggatacggccgtttattattgtgccaaagacggtcactggtaccgcggttactatggctcttactatttagattattggggccaatggggtcaaggcaccctggtgacggtttcttctggtggctcttctcgtagcagctctagcggcggtggcggcagcggtggcggcggtgaaattgtgctgacccagagcccggccacgctgtctttaagcccgggcgagcgtgccacgttaagctgtcgcgccagccaaagcgttagctctagctatttagcctggtatcaacagaagccaggccaggcgccacgtttattaatctatggtgcctcttctcgtgcgaccggtattccggcgcgctttagcggctctggtagcggcaccgacttcaccctgacgatctctcgtttagagccggaggatttcgcggtgtactattgtcaagtttgggatagcagctctggtcaccgcgtggtttttggccagggtacgaaggtggagatcaaa

SEQ ID NO: 980 - DNA, 765 bp, synthetic construct
  source 1..765: mol_type = other DNA
caggtgcagttagttgaaagcggcggtggtgtggtgcaaccgggtcgtagcttacgtttatcttgcgcggcctctggctttacctttagcagctatgcgatgcattgggtgcgtcaggcgccaggtaagggcttagagtgggtggcggttatctcttatgacggtagcaacaagtactacgccgatagcgttaaaggccgcttcacgattagccgcgacaacagcaaaaataccttatacttacagatgaattctttacgcgccgaggatacggccgtttattattgtgccaaagacggtcactggtaccgcggttactatggctcttactatttagattattggggccaatggggtcaaggcaccctggtgacggtttcttctggtggctcttctcgtagcagctctagcggcggtggcggcagcggtggcggcggtgaaattgtgctgacccagagcccggccacgctgtctttaagcccgggcgagcgtgccacgttaagctgtcgcgccagccaaagcgttagctctagctatttagcctggtatcaacagaagccaggccaggcgccacgtttattaatctatggtgcctcttctcgtgcgaccggtattccggcgcgctttagcggctctggtagcggcaccgacttcaccctgacgatctctcgtttagagccggaggatttcgcggtgtactattgtcaagtttgggatagcagctctaacgttgtttttggtcagggcaccaaggttgagattaaa

SEQ ID NO: 981 - DNA, 750 bp, synthetic construct
  source 1..750: mol_type = other DNA
caggtgcagttagttgaaagcggcggtggtgtggtgcaaccgggtcgtagcttacgtttatcttgcgcggcctctggctttacctttagcagctatgcgatgcattgggtgcgtcaggcgccaggtaagggcttagagtgggtggcggttatctcttatgacggtagcaacaagtactacgccgatagcgttaaaggccgcttcacgattagccgcgacaacagcaaaaataccttatacttacagatgaattctttacgcgccgaggatacggccgtttattattgtgccaaagaccacacgatgttaggttctttcgattattggggtcaatggggccaaggcaccctggttacggttagcagcggcggctcttctcgctcttctagctctggtggcggcggctctggcggcggtggcgaaattgttctgacccaaagcccggcgaccctgagcctgagcccaggtgaacgcgccaccctgagctgtcgtgcctctcaaagcgtttcttctagctacctggcctggtatcaacagaaaccaggtcaggccccgcgcttactgatttatggtgcgtcttctcgcgcgacgggtatcccagcgcgtttttctggcagcggctctggcaccgatttcacgctgaccatttctcgcctggaaccagaggactttgccgtttattactgcggtacctgggattctagcatgggtacgtgggtttttggccagggtacgaaggttgaaatcaaa

SEQ ID NO: 982 - DNA, 744 bp, synthetic construct
  source 1..744: mol_type = other DNA
caggtgcagttagttgaaagcggcggtggtgtggtgcaaccgggtcgtagcttacgtttatcttgcgcggcctctggctttacctttagcagctatgcgatgcattgggtgcgtcaggcgccaggtaagggcttagagtgggtggcggttatctcttatgacggtagcaacaagtactacgccgatagcgttaaaggccgcttcacgattagccgcgacaacagcaaaaataccttatacttacagatgaattctttacgcgccgaggatacggccgtttattattgtgccaaagaccacacgatgttaggttctttcgattattggggtcaatggggccaaggcaccctggttacggttagcagcggcggctcttctcgctcttctagctctggtggcggcggctctggcggcggtggcgaaattgttctgacccaaagcccggcgaccctgagcctgagcccaggtgaacgcgccaccctgagctgtcgtgcctctcaaagcgtttcttctagctacctggcctggtatcaacagaaaccaggtcaggccccgcgcttactgatttatggtgcgtcttctcgcgcgacgggtatcccagcgcgtttttctggcagcggctctggcaccgatttcacgctgaccatttctcgcctggaaccagaggactttgccgtttattactgcaagcatcataacagcgaccgctggacgtttggccagggtacgaaggttgaaatcaaa

SEQ ID NO: 983 - DNA, 756 bp, synthetic construct
  source 1..756: mol_type = other DNA
caggtgcagttagttgaaagcggcggtggtgtggtgcaaccgggtcgtagcttacgtttatcttgcgcggcctctggctttacctttagcagctatgcgatgcattgggtgcgtcaggcgccaggtaagggcttagagtgggtggcggttatctcttatgacggtagcaacaagtactacgccgatagcgttaaaggccgcttcacgattagccgcgacaacagcaaaaataccttatacttacagatgaattctttacgcgccgaggatacggccgtttattattgtgccaaagacatctcttcttggtacaagtctggcgcgttcggttattggggtcagtggggccagggtacgttagtgaccgtgagctctggtggttcttctcgttcttctagcagcggcggtggcggctctggcggcggcggtgaaattgttctgacccagagcccggcgaccctgtctttaagcccaggtgaacgtgcgacgctgtcttgtcgcgcgtctcaatctgtgtctagctcttatttagcgtggtatcaacaaaaaccaggccaagccccgcgtctgttaatttacggtgccagctctcgcgccacgggcattccggcccgttttagcggtagcggcagcggtacggattttaccttaacgattagccgcttagagccggaggactttgccgtgtactattgccaacagtaccacaaccgtccgctgtggacgttcggtcaaggcacgaaagtggaaatcaaa

SEQ ID NO: 984 - DNA, 756 bp, synthetic construct
  source 1..756: mol_type = other DNA
caggtgcagttagttgaaagcggcggtggtgtggtgcaaccgggtcgtagcttacgtttatcttgcgcggcctctggctttacctttagcagctatgcgatgcattgggtgcgtcaggcgccaggtaagggcttagagtgggtggcggttatctcttatgacggtagcaacaagtactacgccgatagcgttaaaggccgcttcacgattagccgcgacaacagcaaaaataccttatacttacagatgaattctttacgcgccgaggatacggccgtttattattgtgccaaagacatctcttcttggtacaagtctggcgcgttcggttattggggtcagtggggccagggtacgttagtgaccgtgagctctggtggttcttctcgttcttctagcagcggcggtggcggctctggcggcggcggtgaaattgttctgacccagagcccggcgaccctgtctttaagcccaggtgaacgtgcgacgctgtcttgtcgcgcgtctcaatctgtgtctagctcttatttagcgtggtatcaacaaaaaccaggccaagccccgcgtctgttaatttacggtgccagctctcgcgccacgggcattccggcccgttttagcggtagcggcagcggtacggattttaccttaacgattagccgcttagagccggaggactttgccgtgtactattgccaaagcgccgcctctagcggcagcgttgttttcggtcagggtaccaaagtggagatcaaa

SEQ ID NO: 985 - DNA, 747 bp, synthetic construct
  source 1..747: mol_type = other DNA
caggtgcagttagttgaaagcggcggtggtgtggtgcaaccgggtcgtagcttacgtttatcttgcgcggcctctggctttacctttagcagctatgcgatgcattgggtgcgtcaggcgccaggtaagggcttagagtgggtggcggttatctcttatgacggtagcaacaagtactacgccgatagcgttaaaggccgcttcacgattagccgcgacaacagcaaaaataccttatacttacagatgaattctttacgcgccgaggatacggccgtttattattgtgccaaagacttaggtttcacgcgcggttttgatccatggggtcagtggggtcagggcaccttagttacggtgagcagcggcggttcttctcgctctagctcttctggcggcggcggtagcggcggtggcggcgaaatcgtgctgacgcagagcccggcgaccctgagcctgtctccaggcgagcgcgcgaccctgtcttgccgcgcctctcagtctgtttctagctcttatttagcgtggtaccagcagaagccaggccaagcgccacgcctgctgatttacggcgcctcttctcgtgccacgggtatcccggcgcgtttcagcggcagcggtagcggcaccgacttcaccctgaccatctctcgtctggagccagaggatttcgccgtgtactattgtcagagctacgattcttcttctgattgggtgtttggtcaaggtacgaaagttgaaattaaa

SEQ ID NO: 986 - DNA, 771 bp, synthetic construct
  source 1..771: mol_type = other DNA
caggtgcagttagttgaaagcggcggtggtgtggtgcaaccgggtcgtagcttacgtttatcttgcgcggcctctggctttacctttagcagctatgcgatgcattgggtgcgtcaggcgccaggtaagggcttagagtgggtggcggttatctcttatgacggtagcaacaagtactacgccgatagcgttaaaggccgcttcacgattagccgcgacaacagcaaaaataccttatacttacagatgaattctttacgcgccgaggatacggccgtttattattgtgccaaagacttaggttggtaccgcggttacggccatgccggtgcggttgatatttggggccaatggggtcaaggcaccctggtgacggtttcttctggtggctcttctcgtagcagctctagcggcggtggcggcagcggtggcggcggtgaaattgtgctgacccagagcccggccacgctgtctttaagcccgggcgagcgtgccacgttaagctgtcgcgccagccaaagcgttagctctagctatttagcctggtatcaacagaagccaggccaggcgccacgtttattaatctatggtgcctcttctcgtgcgaccggtattccggcgcgctttagcggctctggtagcggcaccgacttcaccctgacgatctctcgtttagagccggaggatttcgcggtgtactattgtgccgcctgggatgatagcttatcttctggtggcgtttttggccagggtacgaaggtggagatcaaa

SEQ ID NO: 987 - DNA, 747 bp, synthetic construct
  source 1..747: mol_type = other DNA
caggtgcagttagttgaaagcggcggtggtgtggtgcaaccgggtcgtagcttacgtttatcttgcgcggcctctggctttacctttagcagctatgcgatgcattgggtgcgtcaggcgccaggtaagggcttagagtgggtggcggttatctcttatgacggtagcaacaagtactacgccgatagcgttaaaggccgcttcacgattagccgcgacaacagcaaaaataccttatacttacagatgaattctttacgcgccgaggatacggccgtttattattgtgccaaagacttaatctacacggcccaagattattggggtcaatggggccaaggcaccctggttacggttagcagcggcggctcttctcgctcttctagctctggtggcggcggctctggcggcggtggcgaaattgttctgacccaaagcccggcgaccctgagcctgagcccaggtgaacgcgccaccctgagctgtcgtgcctctcaaagcgtttcttctagctacctggcctggtatcaacagaaaccaggtcaggccccgcgcttactgatttatggtgcgtcttctcgcgcgacgggtatcccagcgcgtttttctggcagcggctctggcaccgatttcacgctgaccatttctcgcctggaaccagaggactttgccgtttattactgcgccgaatgggcggacagcttatctggtggcgtgtttggtcaaggtacgaaagttgaaattaaa

SEQ ID NO: 988 - DNA, 741 bp, synthetic construct
  source 1..741: mol_type = other DNA
caggtgcagttagttgaaagcggcggtggtgtggtgcaaccgggtcgtagcttacgtttatcttgcgcggcctctggctttacctttagcagctatgcgatgcattgggtgcgtcaggcgccaggtaagggcttagagtgggtggcggttatctcttatgacggtagcaacaagtactacgccgatagcgttaaaggccgcttcacgattagccgcgacaacagcaaaaataccttatacttacagatgaattctttacgcgccgaggatacggccgtttattattgtgccaaagacttaatctacacggcccaagattattggggtcaatggggccaaggcaccctggttacggttagcagcggcggctcttctcgctcttctagctctggtggcggcggctctggcggcggtggcgaaattgttctgacccaaagcccggcgaccctgagcctgagcccaggtgaacgcgccaccctgagctgtcgtgcctctcaaagcgtttcttctagctacctggcctggtatcaacagaaaccaggtcaggccccgcgcttactgatttatggtgcgtcttctcgcgcgacgggtatcccagcgcgtttttctggcagcggctctggcaccgatttcacgctgaccatttctcgcctggaaccagaggactttgccgtttattactgccaacagctgcgcggctacccattaacctttggccaaggtacgaaggtggagattaaa

SEQ ID NO: 989 - DNA, 744 bp, synthetic construct
  source 1..744: mol_type = other DNA
caggtgcagttagttgaaagcggcggtggtgtggtgcaaccgggtcgtagcttacgtttatcttgcgcggcctctggctttacctttagcagctatgcgatgcattgggtgcgtcaggcgccaggtaagggcttagagtgggtggcggttatctcttatgacggtagcaacaagtactacgccgatagcgttaaaggccgcttcacgattagccgcgacaacagcaaaaataccttatacttacagatgaattctttacgcgccgaggatacggccgtttattattgtgccaaagacttaatctacacggcccaagattattggggtcaatggggccaaggcaccctggttacggttagcagcggcggctcttctcgctcttctagctctggtggcggcggctctggcggcggtggcgaaattgttctgacccaaagcccggcgaccctgagcctgagcccaggtgaacgcgccaccctgagctgtcgtgcctctcaaagcgtttcttctagctacctggcctggtatcaacagaaaccaggtcaggccccgcgcttactgatttatggtgcgtcttctcgcgcgacgggtatcccagcgcgtttttctggcagcggctctggcaccgatttcacgctgaccatttctcgcctggaaccagaggactttgccgtttattactgccaacagagcgacagcacgttatcttggagctttggccaaggtacgaaggtggagattaaa

SEQ ID NO: 990 - DNA, 741 bp, synthetic construct
  source 1..741: mol_type = other DNA
caggtgcagttagttgaaagcggcggtggtgtggtgcaaccgggtcgtagcttacgtttatcttgcgcggcctctggctttacctttagcagctatgcgatgcattgggtgcgtcaggcgccaggtaagggcttagagtgggtggcggttatctcttatgacggtagcaacaagtactacgccgatagcgttaaaggccgcttcacgattagccgcgacaacagcaaaaataccttatacttacagatgaattctttacgcgccgaggatacggccgtttattattgtgccaaagacttaatctacacggcccaagattattggggtcaatggggccaaggcaccctggttacggttagcagcggcggctcttctcgctcttctagctctggtggcggcggctctggcggcggtggcgaaattgttctgacccaaagcccggcgaccctgagcctgagcccaggtgaacgcgccaccctgagctgtcgtgcctctcaaagcgtttcttctagctacctggcctggtatcaacagaaaccaggtcaggccccgcgcttactgatttatggtgcgtcttctcgcgcgacgggtatcccagcgcgtttttctggcagcggctctggcaccgatttcacgctgaccatttctcgcctggaaccagaggactttgccgtttattactgctctcagggcgccaattggccatgggttttcggccagggcacgaaggttgagattaaa

SEQ ID NO: 991 - DNA, 750 bp, synthetic construct
  source 1..750: mol_type = other DNA
caggtgcagttagttgaaagcggcggtggtgtggtgcaaccgggtcgtagcttacgtttatcttgcgcggcctctggctttacctttagcagctatgcgatgcattgggtgcgtcaggcgccaggtaagggcttagagtgggtggcggttatctcttatgacggtagcaacaagtactacgccgatagcgttaaaggccgcttcacgattagccgcgacaacagcaaaaataccttatacttacagatgaattctttacgcgccgaggatacggccgtttattattgtgccaaagacttacgcttctctggtgtttttgattactggggtcagtggggtcagggcaccttagttacggtgagcagcggcggttcttctcgctctagctcttctggcggcggcggtagcggcggtggcggcgaaatcgtgctgacgcagagcccggcgaccctgagcctgtctccaggcgagcgcgcgaccctgtcttgccgcgcctctcagtctgtttctagctcttatttagcgtggtaccagcagaagccaggccaagcgccacgcctgctgatttacggcgcctcttctcgtgccacgggtatcccggcgcgtttcagcggcagcggtagcggcaccgacttcaccctgaccatctctcgtctggagccagaggatttcgccgtgtactattgtcagagctacgattcttctggtccgggctgggtgttcggtcaaggtaccaaggtggaaattaaa

SEQ ID NO: 992 - DNA, 750 bp, synthetic construct
  source 1..750: mol_type = other DNA
caggtgcagttagttgaaagcggcggtggtgtggtgcaaccgggtcgtagcttacgtttatcttgcgcggcctctggctttacctttagcagctatgcgatgcattgggtgcgtcaggcgccaggtaagggcttagagtgggtggcggttatctcttatgacggtagcaacaagtactacgccgatagcgttaaaggccgcttcacgattagccgcgacaacagcaaaaataccttatacttacagatgaattctttacgcgccgaggatacggccgtttattattgtgccaaagacttaacgttcgcccgcgccctggattactggggtcagtggggtcagggcaccttagttacggtgagcagcggcggttcttctcgctctagctcttctggcggcggcggtagcggcggtggcggcgaaatcgtgctgacgcagagcccggcgaccctgagcctgtctccaggcgagcgcgcgaccctgtcttgccgcgcctctcagtctgtttctagctcttatttagcgtggtaccagcagaagccaggccaagcgccacgcctgctgatttacggcgcctcttctcgtgccacgggtatcccggcgcgtttcagcggcagcggtagcggcaccgacttcaccctgaccatctctcgtctggagccagaggatttcgccgtgtactattgtgcgaccggtgatgactctcgcaatggcgtggttttcggtcaaggcacgaaagtggaaatcaaa

SEQ ID NO: 993 - DNA, 750 bp, synthetic construct
  source 1..750: mol_type = other DNA
caggtgcagttagttgaaagcggcggtggtgtggtgcaaccgggtcgtagcttacgtttatcttgcgcggcctctggctttacctttagcagctatgcgatgcattgggtgcgtcaggcgccaggtaagggcttagagtgggtggcggttatctcttatgacggtagcaacaagtactacgccgatagcgttaaaggccgcttcacgattagccgcgacaacagcaaaaataccttatacttacagatgaattctttacgcgccgaggatacggccgtttattattgtgccaaagacttaacgttcgcccgcgccctggattactggggtcagtggggtcagggcaccttagttacggtgagcagcggcggttcttctcgctctagctcttctggcggcggcggtagcggcggtggcggcgaaatcgtgctgacgcagagcccggcgaccctgagcctgtctccaggcgagcgcgcgaccctgtcttgccgcgcctctcagtctgtttctagctcttatttagcgtggtaccagcagaagccaggccaagcgccacgcctgctgatttacggcgcctcttctcgtgccacgggtatcccggcgcgtttcagcggcagcggtagcggcaccgacttcaccctgaccatctctcgtctggagccagaggatttcgccgtgtactattgtgaagcgtgggacgattcttctatcggctgggtgtttggtcaaggtacgaaagttgaaattaaa

SEQ ID NO: 994 - DNA, 744 bp, synthetic construct
  source 1..744: mol_type = other DNA
caggtgcagttagttgaaagcggcggtggtgtggtgcaaccgggtcgtagcttacgtttatcttgcgcggcctctggctttacctttagcagctatgcgatgcattgggtgcgtcaggcgccaggtaagggcttagagtgggtggcggttatctcttatgacggtagcaacaagtactacgccgatagcgttaaaggccgcttcacgattagccgcgacaacagcaaaaataccttatacttacagatgaattctttacgcgccgaggatacggccgtttattattgtgccaaagacttaacgttcgcccgcgccctggattactggggtcagtggggtcagggcaccttagttacggtgagcagcggcggttcttctcgctctagctcttctggcggcggcggtagcggcggtggcggcgaaatcgtgctgacgcagagcccggcgaccctgagcctgtctccaggcgagcgcgcgaccctgtcttgccgcgcctctcagtctgtttctagctcttatttagcgtggtaccagcagaagccaggccaagcgccacgcctgctgatttacggcgcctcttctcgtgccacgggtatcccggcgcgtttcagcggcagcggtagcggcaccgacttcaccctgaccatctctcgtctggagccagaggatttcgccgtgtactattgtatgcagagcatccagccaggttggacgtttggccagggtacgaaggttgaaatcaaa

SEQ ID NO: 995 - DNA, 747 bp, synthetic construct
  source 1..747: mol_type = other DNA
caggtgcagttagttgaaagcggcggtggtgtggtgcaaccgggtcgtagcttacgtttatcttgcgcggcctctggctttacctttagcagctatgcgatgcattgggtgcgtcaggcgccaggtaagggcttagagtgggtggcggttatctcttatgacggtagcaacaagtactacgccgatagcgttaaaggccgcttcacgattagccgcgacaacagcaaaaataccttatacttacagatgaattctttacgcgccgaggatacggccgtttattattgtgccaaagacttaacgttcgcccgcgccctggattactggggtcagtggggtcagggcaccttagttacggtgagcagcggcggttcttctcgctctagctcttctggcggcggcggtagcggcggtggcggcgaaatcgtgctgacgcagagcccggcgaccctgagcctgtctccaggcgagcgcgcgaccctgtcttgccgcgcctctcagtctgtttctagctcttatttagcgtggtaccagcagaagccaggccaagcgccacgcctgctgatttacggcgcctcttctcgtgccacgggtatcccggcgcgtttcagcggcagcggtagcggcaccgacttcaccctgaccatctctcgtctggagccagaggatttcgccgtgtactattgtcaggcgtgggacagctctccagacgatgtgtttggtcaaggtacgaaagttgaaattaaa

SEQ ID NO: 996 - DNA, 744 bp, synthetic construct
  source 1..744: mol_type = other DNA
caggtgcagttagttgaaagcggcggtggtgtggtgcaaccgggtcgtagcttacgtttatcttgcgcggcctctggctttacctttagcagctatgcgatgcattgggtgcgtcaggcgccaggtaagggcttagagtgggtggcggttatctcttatgacggtagcaacaagtactacgccgatagcgttaaaggccgcttcacgattagccgcgacaacagcaaaaataccttatacttacagatgaattctttacgcgccgaggatacggccgtttattattgtgccaaagacttaacgttcgcccgcgccctggattactggggtcagtggggtcagggcaccttagttacggtgagcagcggcggttcttctcgctctagctcttctggcggcggcggtagcggcggtggcggcgaaatcgtgctgacgcagagcccggcgaccctgagcctgtctccaggcgagcgcgcgaccctgtcttgccgcgcctctcagtctgtttctagctcttatttagcgtggtaccagcagaagccaggccaagcgccacgcctgctgatttacggcgcctcttctcgtgccacgggtatcccggcgcgtttcagcggcagcggtagcggcaccgacttcaccctgaccatctctcgtctggagccagaggatttcgccgtgtactattgtcaggcgtacgattctggtaacattgtgtttggtcaaggtacgaaagttgaaattaaa

SEQ ID NO: 997 - DNA, 744 bp, synthetic construct
  source 1..744: mol_type = other DNA
caggtgcagttagttgaaagcggcggtggtgtggtgcaaccgggtcgtagcttacgtttatcttgcgcggcctctggctttacctttagcagctatgcgatgcattgggtgcgtcaggcgccaggtaagggcttagagtgggtggcggttatctcttatgacggtagcaacaagtactacgccgatagcgttaaaggccgcttcacgattagccgcgacaacagcaaaaataccttatacttacagatgaattctttacgcgccgaggatacggccgtttattattgtgccaaagacttaacgttcgcccgcgccctggattactggggtcagtggggtcagggcaccttagttacggtgagcagcggcggttcttctcgctctagctcttctggcggcggcggtagcggcggtggcggcgaaatcgtgctgacgcagagcccggcgaccctgagcctgtctccaggcgagcgcgcgaccctgtcttgccgcgcctctcagtctgtttctagctcttatttagcgtggtaccagcagaagccaggccaagcgccacgcctgctgatttacggcgcctcttctcgtgccacgggtatcccggcgcgtttcagcggcagcggtagcggcaccgacttcaccctgaccatctctcgtctggagccagaggatttcgccgtgtactattgtcaggaatgggacagctctatcggtgtgtttggccaaggtacgaaggtggagattaaa

SEQ ID NO: 998 - DNA, 753 bp, synthetic construct
  source 1..753: mol_type = other DNA
caggtgcagttagttgaaagcggcggtggtgtggtgcaaccgggtcgtagcttacgtttatcttgcgcggcctctggctttacctttagcagctatgcgatgcattgggtgcgtcaggcgccaggtaagggcttagagtgggtggcggttatctcttatgacggtagcaacaagtactacgccgatagcgttaaaggccgcttcacgattagccgcgacaacagcaaaaataccttatacttacagatgaattctttacgcgccgaggatacggccgtttattattgtgccaaagacttaacgttcgcccgcgccctggattactggggtcagtggggtcagggcaccttagttacggtgagcagcggcggttcttctcgctctagctcttctggcggcggcggtagcggcggtggcggcgaaatcgtgctgacgcagagcccggcgaccctgagcctgtctccaggcgagcgcgcgaccctgtcttgccgcgcctctcagtctgtttctagctcttatttagcgtggtaccagcagaagccaggccaagcgccacgcctgctgatttacggcgcctcttctcgtgccacgggtatcccggcgcgtttcagcggcagcggtagcggcaccgacttcaccctgaccatctctcgtctggagccagaggatttcgccgtgtactattgtcagccgtacgattcttcttctagcggcccgtacgttttcggtcagggtaccaaagtggagatcaaa

SEQ ID NO: 999 - DNA, 744 bp, synthetic construct
  source 1..744: mol_type = other DNA
caggtgcagttagttgaaagcggcggtggtgtggtgcaaccgggtcgtagcttacgtttatcttgcgcggcctctggctttacctttagcagctatgcgatgcattgggtgcgtcaggcgccaggtaagggcttagagtgggtggcggttatctcttatgacggtagcaacaagtactacgccgatagcgttaaaggccgcttcacgattagccgcgacaacagcaaaaataccttatacttacagatgaattctttacgcgccgaggatacggccgtttattattgtgccaaagacttaacgttcgcccgcgccctggattactggggtcagtggggtcagggcaccttagttacggtgagcagcggcggttcttctcgctctagctcttctggcggcggcggtagcggcggtggcggcgaaatcgtgctgacgcagagcccggcgaccctgagcctgtctccaggcgagcgcgcgaccctgtcttgccgcgcctctcagtctgtttctagctcttatttagcgtggtaccagcagaagccaggccaagcgccacgcctgctgatttacggcgcctcttctcgtgccacgggtatcccggcgcgtttcagcggcagcggtagcggcaccgacttcaccctgaccatctctcgtctggagccagaggatttcgccgtgtactattgtcagcagtcttatacgccaacgtatacctttggtcaaggtacgaaagttgaaattaaa

SEQ ID NO: 1000 - DNA, 747 bp, synthetic construct
  source 1..747: mol_type = other DNA
caggtgcagttagttgaaagcggcggtggtgtggtgcaaccgggtcgtagcttacgtttatcttgcgcggcctctggctttacctttagcagctatgcgatgcattgggtgcgtcaggcgccaggtaagggcttagagtgggtggcggttatctcttatgacggtagcaacaagtactacgccgatagcgttaaaggccgcttcacgattagccgcgacaacagcaaaaataccttatacttacagatgaattctttacgcgccgaggatacggccgtttattattgtgccaaagacttaacgttcgcccgcgccctggattactggggtcagtggggtcagggcaccttagttacggtgagcagcggcggttcttctcgctctagctcttctggcggcggcggtagcggcggtggcggcgaaatcgtgctgacgcagagcccggcgaccctgagcctgtctccaggcgagcgcgcgaccctgtcttgccgcgcctctcagtctgtttctagctcttatttagcgtggtaccagcagaagccaggccaagcgccacgcctgctgatttacggcgcctcttctcgtgccacgggtatcccggcgcgtttcagcggcagcggtagcggcaccgacttcaccctgaccatctctcgtctggagccagaggatttcgccgtgtactattgtcagcagtacaataactggccaccatatacctttggtcaaggtacgaaagttgaaattaaa

SEQ ID NO: 1001 - DNA, 750 bp, synthetic construct
  source 1..750: mol_type = other DNA
caggtgcagttagttgaaagcggcggtggtgtggtgcaaccgggtcgtagcttacgtttatcttgcgcggcctctggctttacctttagcagctatgcgatgcattgggtgcgtcaggcgccaggtaagggcttagagtgggtggcggttatctcttatgacggtagcaacaagtactacgccgatagcgttaaaggccgcttcacgattagccgcgacaacagcaaaaataccttatacttacagatgaattctttacgcgccgaggatacggccgtttattattgtgccaaagacttaacgttcgcccgcgccctggattactggggtcagtggggtcagggcaccttagttacggtgagcagcggcggttcttctcgctctagctcttctggcggcggcggtagcggcggtggcggcgaaatcgtgctgacgcagagcccggcgaccctgagcctgtctccaggcgagcgcgcgaccctgtcttgccgcgcctctcagtctgtttctagctcttatttagcgtggtaccagcagaagccaggccaagcgccacgcctgctgatttacggcgcctcttctcgtgccacgggtatcccggcgcgtttcagcggcagcggtagcggcaccgacttcaccctgaccatctctcgtctggagccagaggatttcgccgtgtactattgtcagagctacgataacacgttacgtggcagcatcttcggtcaaggcacgaaagtggaaatcaaa

SEQ ID NO: 1002 - DNA, 750 bp, synthetic construct
  source 1..750: mol_type = other DNA
caggtgcagttagttgaaagcggcggtggtgtggtgcaaccgggtcgtagcttacgtttatcttgcgcggcctctggctttacctttagcagctatgcgatgcattgggtgcgtcaggcgccaggtaagggcttagagtgggtggcggttatctcttatgacggtagcaacaagtactacgccgatagcgttaaaggccgcttcacgattagccgcgacaacagcaaaaataccttatacttacagatgaattctttacgcgccgaggatacggccgtttattattgtgccaaagacttaacgttcgcccgcgccctggattactggggtcagtggggtcagggcaccttagttacggtgagcagcggcggttcttctcgctctagctcttctggcggcggcggtagcggcggtggcggcgaaatcgtgctgacgcagagcccggcgaccctgagcctgtctccaggcgagcgcgcgaccctgtcttgccgcgcctctcagtctgtttctagctcttatttagcgtggtaccagcagaagccaggccaagcgccacgcctgctgatttacggcgcctcttctcgtgccacgggtatcccggcgcgtttcagcggcagcggtagcggcaccgacttcaccctgaccatctctcgtctggagccagaggatttcgccgtgtactattgtcagagctacgattcttctttaagcgcgtatgttttcggtcaaggcacgaaagtggaaatcaaa

SEQ ID NO: 1003 - DNA, 750 bp, synthetic construct
  source 1..750: mol_type = other DNA
caggtgcagttagttgaaagcggcggtggtgtggtgcaaccgggtcgtagcttacgtttatcttgcgcggcctctggctttacctttagcagctatgcgatgcattgggtgcgtcaggcgccaggtaagggcttagagtgggtggcggttatctcttatgacggtagcaacaagtactacgccgatagcgttaaaggccgcttcacgattagccgcgacaacagcaaaaataccttatacttacagatgaattctttacgcgccgaggatacggccgtttattattgtgccaaagacttaacgttcgcccgcgccctggattactggggtcagtggggtcagggcaccttagttacggtgagcagcggcggttcttctcgctctagctcttctggcggcggcggtagcggcggtggcggcgaaatcgtgctgacgcagagcccggcgaccctgagcctgtctccaggcgagcgcgcgaccctgtcttgccgcgcctctcagtctgtttctagctcttatttagcgtggtaccagcagaagccaggccaagcgccacgcctgctgatttacggcgcctcttctcgtgccacgggtatcccggcgcgtttcagcggcagcggtagcggcaccgacttcaccctgaccatctctcgtctggagccagaggatttcgccgtgtactattgtcagagctacgatacgtctcgcggcattaaagttttcggtcaaggcacgaaagtggaaatcaaa

SEQ ID NO: 1004 - DNA, 744 bp, synthetic construct
  source 1..744: mol_type = other DNA
caggtgcagttagttgaaagcggcggtggtgtggtgcaaccgggtcgtagcttacgtttatcttgcgcggcctctggctttacctttagcagctatgcgatgcattgggtgcgtcaggcgccaggtaagggcttagagtgggtggcggttatctcttatgacggtagcaacaagtactacgccgatagcgttaaaggccgcttcacgattagccgcgacaacagcaaaaataccttatacttacagatgaattctttacgcgccgaggatacggccgtttattattgtgccaaagacttaacgttcgcccgcgccctggattactggggtcagtggggtcagggcaccttagttacggtgagcagcggcggttcttctcgctctagctcttctggcggcggcggtagcggcggtggcggcgaaatcgtgctgacgcagagcccggcgaccctgagcctgtctccaggcgagcgcgcgaccctgtcttgccgcgcctctcagtctgtttctagctcttatttagcgtggtaccagcagaagccaggccaagcgccacgcctgctgatttacggcgcctcttctcgtgccacgggtatcccggcgcgtttcagcggcagcggtagcggcaccgacttcaccctgaccatctctcgtctggagccagaggatttcgccgtgtactattgtcagacctgggacagctctacgggtgtgtttggccaaggtacgaaggtggagattaaa

SEQ ID NO: 1005 - DNA, 756 bp, synthetic construct
  source 1..756: mol_type = other DNA
caggtgcagttagttgaaagcggcggtggtgtggtgcaaccgggtcgtagcttacgtttatcttgcgcggcctctggctttacctttagcagctatgcgatgcattgggtgcgtcaggcgccaggtaagggcttagagtgggtggcggttatctcttatgacggtagcaacaagtactacgccgatagcgttaaaggccgcttcacgattagccgcgacaacagcaaaaataccttatacttacagatgaattctttacgcgccgaggatacggccgtttattattgtgccaaagacttaacgttcgcccgcgccctggattactggggtcagtggggtcagggcaccttagttacggtgagcagcggcggttcttctcgctctagctcttctggcggcggcggtagcggcggtggcggcgaaatcgtgctgacgcagagcccggcgaccctgagcctgtctccaggcgagcgcgcgaccctgtcttgccgcgcctctcagtctgtttctagctcttatttagcgtggtaccagcagaagccaggccaagcgccacgcctgctgatttacggcgcctcttctcgtgccacgggtatcccggcgcgtttcagcggcagcggtagcggcaccgacttcaccctgaccatctctcgtctggagccagaggatttcgccgtgtactattgtcaggtgtgggacagctcttctgaccatccgagctgggttttcggtcaaggcacgaaagtggaaatcaaa

SEQ ID NO: 1006 - DNA, 750 bp, synthetic construct
  source 1..750: mol_type = other DNA
caggtgcagttagttgaaagcggcggtggtgtggtgcaaccgggtcgtagcttacgtttatcttgcgcggcctctggctttacctttagcagctatgcgatgcattgggtgcgtcaggcgccaggtaagggcttagagtgggtggcggttatctcttatgacggtagcaacaagtactacgccgatagcgttaaaggccgcttcacgattagccgcgacaacagcaaaaataccttatacttacagatgaattctttacgcgccgaggatacggccgtttattattgtgccaaagacttaacgttcgcccgcgccctggattactggggtcagtggggtcagggcaccttagttacggtgagcagcggcggttcttctcgctctagctcttctggcggcggcggtagcggcggtggcggcgaaatcgtgctgacgcagagcccggcgaccctgagcctgtctccaggcgagcgcgcgaccctgtcttgccgcgcctctcagtctgtttctagctcttatttagcgtggtaccagcagaagccaggccaagcgccacgcctgctgatttacggcgcctcttctcgtgccacgggtatcccggcgcgtttcagcggcagcggtagcggcaccgacttcaccctgaccatctctcgtctggagccagaggatttcgccgtgtactattgtagcagctacacctcttcttctaccgaaggcgttttcggtcaaggcacgaaagtggaaatcaaa

SEQ ID NO: 1007 - DNA, 753 bp, synthetic construct
  source 1..753: mol_type = other DNA
caggtgcagttagttgaaagcggcggtggtgtggtgcaaccgggtcgtagcttacgtttatcttgcgcggcctctggctttacctttagcagctatgcgatgcattgggtgcgtcaggcgccaggtaagggcttagagtgggtggcggttatctcttatgacggtagcaacaagtactacgccgatagcgttaaaggccgcttcacgattagccgcgacaacagcaaaaataccttatacttacagatgaattctttacgcgccgaggatacggccgtttattattgtgccaaagacttaacgcaattatacttcgcgtttgactactggggccaatggggccagggcacgttagttaccgtgagcagcggtggttcttctcgcagctcttctagcggcggcggtggcagcggtggcggcggcgagattgtgttaacccagagcccggcgaccctgagcttatctccgggtgagcgtgcgaccttaagctgtcgcgccagccaatctgttagctctagctacctggcctggtatcagcaaaagccgggtcaggccccacgtctgctgatctatggtgcctctagccgcgccacgggtattccggcgcgctttagcggctctggcagcggcacggactttaccctgacgatcagccgtttagagccagaagacttcgcggtttattactgccagacgtggggcacgggtacgtggggctgggtgtttggtcaaggtacgaaagttgaaattaaa

SEQ ID NO: 1008 - DNA, 750 bp, synthetic construct
  source 1..750: mol_type = other DNA
caggtgcagttagttgaaagcggcggtggtgtggtgcaaccgggtcgtagcttacgtttatcttgcgcggcctctggctttacctttagcagctatgcgatgcattgggtgcgtcaggcgccaggtaagggcttagagtgggtggcggttatctcttatgacggtagcaacaagtactacgccgatagcgttaaaggccgcttcacgattagccgcgacaacagcaaaaataccttatacttacagatgaattctttacgcgccgaggatacggccgtttattattgtgccaaagacttagttacgggttctttagattattggggtcaatggggccaaggcaccctggttacggttagcagcggcggctcttctcgctcttctagctctggtggcggcggctctggcggcggtggcgaaattgttctgacccaaagcccggcgaccctgagcctgagcccaggtgaacgcgccaccctgagctgtcgtgcctctcaaagcgtttcttctagctacctggcctggtatcaacagaaaccaggtcaggccccgcgcttactgatttatggtgcgtcttctcgcgcgacgggtatcccagcgcgtttttctggcagcggctctggcaccgatttcacgctgaccatttctcgcctggaaccagaggactttgccgtttattactgccaacagcgttctaattggccaccaccagcgtttaccttcggtcaaggtaccaaggtggaaattaaa

SEQ ID NO: 1009 - DNA, 759 bp, synthetic construct
  source 1..759: mol_type = other DNA
caggtgcagttagttgaaagcggcggtggtgtggtgcaaccgggtcgtagcttacgtttatcttgcgcggcctctggctttacctttagcagctatgcgatgcattgggtgcgtcaggcgccaggtaagggcttagagtgggtggcggttatctcttatgacggtagcaacaagtactacgccgatagcgttaaaggccgcttcacgattagccgcgacaacagcaaaaataccttatacttacagatgaattctttacgcgccgaggatacggccgtttattattgtgccaaagaccaagagggttaccgcgcctatggctacaacggcatggacgtgtggggccagtggggtcaaggtaccctggtgaccgtttcttctggtggtagctctcgcagcagcagctctggcggcggtggcagcggcggtggcggcgagattgtgctgacccagagcccggcgacgttaagcttatctccgggcgaacgcgcgacgttatcttgccgcgcctctcagtctgtgtctagctcttatctggcctggtaccagcaaaaaccaggtcaggcgccgcgcctgttaatctacggcgcctcttctcgcgcgaccggcatcccggcgcgtttcagcggcagcggttctggcaccgatttcacgctgaccatctctcgcctggagccagaagactttgccgtgtattactgccaacaagccaatagcaccccattaacgttcggccaaggcaccaaagttgagatcaaa

SEQ ID NO: 1010 - DNA, 759 bp, synthetic construct
  source 1..759: mol_type = other DNA
caggtgcagttagttgaaagcggcggtggtgtggtgcaaccgggtcgtagcttacgtttatcttgcgcggcctctggctttacctttagcagctatgcgatgcattgggtgcgtcaggcgccaggtaagggcttagagtgggtggcggttatctcttatgacggtagcaacaagtactacgccgatagcgttaaaggccgcttcacgattagccgcgacaacagcaaaaataccttatacttacagatgaattctttacgcgccgaggatacggccgtttattattgtgccaaagaccaagagggttaccgcgcctatggctacaacggcatggacgtgtggggccagtggggtcaaggtaccctggtgaccgtttcttctggtggtagctctcgcagcagcagctctggcggcggtggcagcggcggtggcggcgagattgtgctgacccagagcccggcgacgttaagcttatctccgggcgaacgcgcgacgttatcttgccgcgcctctcagtctgtgtctagctcttatctggcctggtaccagcaaaaaccaggtcaggcgccgcgcctgttaatctacggcgcctcttctcgcgcgaccggcatcccggcgcgtttcagcggcagcggttctggcaccgatttcacgctgaccatctctcgcctggagccagaagactttgccgtgtattactgccaatcttacgatgcgaataacgttgttttcggccaaggcaccaaagttgagatcaaa

SEQ ID NO: 1011 - DNA, 747 bp, synthetic construct
  source 1..747: mol_type = other DNA
caggtgcagttagttgaaagcggcggtggtgtggtgcaaccgggtcgtagcttacgtttatcttgcgcggcctctggctttacctttagcagctatgcgatgcattgggtgcgtcaggcgccaggtaagggcttagagtgggtggcggttatctcttatgacggtagcaacaagtactacgccgatagcgttaaaggccgcttcacgattagccgcgacaacagcaaaaataccttatacttacagatgaattctttacgcgccgaggatacggccgtttattattgtgccaaagaccaatctggtacgatcgccctggattactggggtcagtggggtcagggcaccttagttacggtgagcagcggcggttcttctcgctctagctcttctggcggcggcggtagcggcggtggcggcgaaatcgtgctgacgcagagcccggcgaccctgagcctgtctccaggcgagcgcgcgaccctgtcttgccgcgcctctcagtctgtttctagctcttatttagcgtggtaccagcagaagccaggccaagcgccacgcctgctgatttacggcgcctcttctcgtgccacgggtatcccggcgcgtttcagcggcagcggtagcggcaccgacttcaccctgaccatctctcgtctggagccagaggatttcgccgtgtactattgtagcagctacacctcttcttctccggtggtgttcggtcaaggtaccaaggtggaaattaaa

SEQ ID NO: 1012 - DNA, 750 bp, synthetic construct
  source 1..750: mol_type = other DNA
caggtgcagttagttgaaagcggcggtggtgtggtgcaaccgggtcgtagcttacgtttatcttgcgcggcctctggctttacctttagcagctatgcgatgcattgggtgcgtcaggcgccaggtaagggcttagagtgggtggcggttatctcttatgacggtagcaacaagtactacgccgatagcgttaaaggccgcttcacgattagccgcgacaacagcaaaaataccttatacttacagatgaattctttacgcgccgaggatacggccgtttattattgtgccaaagaccgccgcggtgccggttactattatttcgaccattggggtcagtggggccagggtacgttagtgaccgtgagctctggtggttcttctcgttcttctagcagcggcggtggcggctctggcggcggcggtgaaattgttctgacccagagcccggcgaccctgtctttaagcccaggtgaacgtgcgacgctgtcttgtcgcgcgtctcaatctgtgtctagctcttatttagcgtggtatcaacaaaaaccaggccaagccccgcgtctgttaatttacggtgccagctctcgcgccacgggcattccggcccgttttagcggtagcggcagcggtacggattttaccttaacgattagccgcttagagccggaggactttgccgtgtactattgccaacagtactacggtagcccgctgacgttcggtcaaggcacgaaagtggaaatcaaa

SEQ ID NO: 1013 - DNA, 747 bp, synthetic construct
  source 1..747: mol_type = other DNA
caggtgcagttagttgaaagcggcggtggtgtggtgcaaccgggtcgtagcttacgtttatcttgcgcggcctctggctttacctttagcagctatgcgatgcattgggtgcgtcaggcgccaggtaagggcttagagtgggtggcggttatctcttatgacggtagcaacaagtactacgccgatagcgttaaaggccgcttcacgattagccgcgacaacagcaaaaataccttatacttacagatgaattctttacgcgccgaggatacggccgtttattattgtgccaaagactctgccgccgccgccgccgattattggggtcaatggggccaaggcaccctggttacggttagcagcggcggctcttctcgctcttctagctctggtggcggcggctctggcggcggtggcgaaattgttctgacccaaagcccggcgaccctgagcctgagcccaggtgaacgcgccaccctgagctgtcgtgcctctcaaagcgtttcttctagctacctggcctggtatcaacagaaaccaggtcaggccccgcgcttactgatttatggtgcgtcttctcgcgcgacgggtatcccagcgcgtttttctggcagcggctctggcaccgatttcacgctgaccatttctcgcctggaaccagaggactttgccgtttattactgctctagctatacgaatacgaacacgctggtggtgttcggtcaaggtaccaaggtggaaattaaa

SEQ ID NO: 1014 - DNA, 762 bp, synthetic construct
  source 1..762: mol_type = other DNA
caggtgcagttagttgaaagcggcggtggtgtggtgcaaccgggtcgtagcttacgtttatcttgcgcggcctctggctttacctttagcagctatgcgatgcattgggtgcgtcaggcgccaggtaagggcttagagtgggtggcggttatctcttatgacggtagcaacaagtactacgccgatagcgttaaaggccgcttcacgattagccgcgacaacagcaaaaataccttatacttacagatgaattctttacgcgccgaggatacggccgtttattattgtgccaaagacacgtctcgctactctttagcgtttggtttcggcgacttttggggccagtggggtcaaggtaccctggtgaccgtttcttctggtggtagctctcgcagcagcagctctggcggcggtggcagcggcggtggcggcgagattgtgctgacccagagcccggcgacgttaagcttatctccgggcgaacgcgcgacgttatcttgccgcgcctctcagtctgtgtctagctcttatctggcctggtaccagcaaaaaccaggtcaggcgccgcgcctgttaatctacggcgcctcttctcgcgcgaccggcatcccggcgcgtttcagcggcagcggttctggcaccgatttcacgctgaccatctctcgcctggagccagaagactttgccgtgtattactgctcttcttacaccagcagctctccatacgttgtgttcggccagggcacgaaggttgaaatcaaa

SEQ ID NO: 1015 - DNA, 771 bp, synthetic construct
  source 1..771: mol_type = other DNA
caggtgcagttagttgaaagcggcggtggtgtggtgcaaccgggtcgtagcttacgtttatcttgcgcggcctctggctttacctttagcagctatgcgatgcattgggtgcgtcaggcgccaggtaagggcttagagtgggtggcggttatctcttatgacggtagcaacaagtactacgccgatagcgttaaaggccgcttcacgattagccgcgacaacagcaaaaataccttatacttacagatgaattctttacgcgccgaggatacggccgtttattattgtgccaaagactggggttggtaccgcggttacggtcatgcgggtgccgtggacatttggggccagtggggtcaaggtaccctggtgaccgtttcttctggtggtagctctcgcagcagcagctctggcggcggtggcagcggcggtggcggcgagattgtgctgacccagagcccggcgacgttaagcttatctccgggcgaacgcgcgacgttatcttgccgcgcctctcagtctgtgtctagctcttatctggcctggtaccagcaaaaaccaggtcaggcgccgcgcctgttaatctacggcgcctcttctcgcgcgaccggcatcccggcgcgtttcagcggcagcggttctggcaccgatttcacgctgaccatctctcgcctggagccagaagactttgccgtgtattactgcgccgcctgggacgatagcctgaacggtcactacgtgttcggccagggcacgaaggttgaaatcaaa

SEQ ID NO: 1016 - DNA, 768 bp, synthetic construct
  source 1..768: mol_type = other DNA
caggtgcagttagttgaaagcggcggtggtgtggtgcaaccgggtcgtagcttacgtttatcttgcgcggcctctggctttacctttagcagctatgcgatgcattgggtgcgtcaggcgccaggtaagggcttagagtgggtggcggttatctcttatgacggtagcaacaagtactacgccgatagcgttaaaggccgcttcacgattagccgcgacaacagcaaaaataccttatacttacagatgaattctttacgcgccgaggatacggccgtttattattgtgccaaagactggggttggtaccgcggttacggtcatgcgggtgccgtggacatttggggccagtggggtcaaggtaccctggtgaccgtttcttctggtggtagctctcgcagcagcagctctggcggcggtggcagcggcggtggcggcgagattgtgctgacccagagcccggcgacgttaagcttatctccgggcgaacgcgcgacgttatcttgccgcgcctctcagtctgtgtctagctcttatctggcctggtaccagcaaaaaccaggtcaggcgccgcgcctgttaatctacggcgcctcttctcgcgcgaccggcatcccggcgcgtttcagcggcagcggttctggcaccgatttcacgctgaccatctctcgcctggagccagaagactttgccgtgtattactgcgccgagtgggccgatagcctgtctggtggtgtttttggtcagggcaccaaggttgagattaaa

SEQ ID NO: 1017 - DNA, 771 bp, synthetic construct
  source 1..771: mol_type = other DNA
caggtgcagttagttgaaagcggcggtggtgtggtgcaaccgggtcgtagcttacgtttatcttgcgcggcctctggctttacctttagcagctatgcgatgcattgggtgcgtcaggcgccaggtaagggcttagagtgggtggcggttatctcttatgacggtagcaacaagtactacgccgatagcgttaaaggccgcttcacgattagccgcgacaacagcaaaaataccttatacttacagatgaattctttacgcgccgaggatacggccgtttattattgtgccaaagactggggttggtaccgcggttacggtcatgcgggtgccgtggacatttggggccagtggggtcaaggtaccctggtgaccgtttcttctggtggtagctctcgcagcagcagctctggcggcggtggcagcggcggtggcggcgagattgtgctgacccagagcccggcgacgttaagcttatctccgggcgaacgcgcgacgttatcttgccgcgcctctcagtctgtgtctagctcttatctggcctggtaccagcaaaaaccaggtcaggcgccgcgcctgttaatctacggcgcctcttctcgcgcgaccggcatcccggcgcgtttcagcggcagcggttctggcaccgatttcacgctgaccatctctcgcctggagccagaagactttgccgtgtattactgcgaggcctgggacgatagcctgtctggttacgttgtgttcggccagggcacgaaggttgaaatcaaa

SEQ ID NO: 1018 - DNA, 765 bp, synthetic construct
  source 1..765: mol_type = other DNA
caggtgcagttagttgaaagcggcggtggtgtggtgcaaccgggtcgtagcttacgtttatcttgcgcggcctctggctttacctttagcagctatgcgatgcattgggtgcgtcaggcgccaggtaagggcttagagtgggtggcggttatctcttatgacggtagcaacaagtactacgccgatagcgttaaaggccgcttcacgattagccgcgacaacagcaaaaataccttatacttacagatgaattctttacgcgccgaggatacggccgtttattattgtgccaaagactggggttggtaccgcggttacggtcatgcgggtgccgtggacatttggggccagtggggtcaaggtaccctggtgaccgtttcttctggtggtagctctcgcagcagcagctctggcggcggtggcagcggcggtggcggcgagattgtgctgacccagagcccggcgacgttaagcttatctccgggcgaacgcgcgacgttatcttgccgcgcctctcagtctgtgtctagctcttatctggcctggtaccagcaaaaaccaggtcaggcgccgcgcctgttaatctacggcgcctcttctcgcgcgaccggcatcccggcgcgtttcagcggcagcggttctggcaccgatttcacgctgaccatctctcgcctggagccagaagactttgccgtgtattactgcgagtcttacgatagcagccgcaacgttgtttttggtcagggcaccaaggttgagattaaa

SEQ ID NO: 1019 - DNA, 765 bp, synthetic construct
  source 1..765: mol_type = other DNA
caggtgcagttagttgaaagcggcggtggtgtggtgcaaccgggtcgtagcttacgtttatcttgcgcggcctctggctttacctttagcagctatgcgatgcattgggtgcgtcaggcgccaggtaagggcttagagtgggtggcggttatctcttatgacggtagcaacaagtactacgccgatagcgttaaaggccgcttcacgattagccgcgacaacagcaaaaataccttatacttacagatgaattctttacgcgccgaggatacggccgtttattattgtgccaaagactggggttggtaccgcggttacggtcatgcgggtgccgtggacatttggggccagtggggtcaaggtaccctggtgaccgtttcttctggtggtagctctcgcagcagcagctctggcggcggtggcagcggcggtggcggcgagattgtgctgacccagagcccggcgacgttaagcttatctccgggcgaacgcgcgacgttatcttgccgcgcctctcagtctgtgtctagctcttatctggcctggtaccagcaaaaaccaggtcaggcgccgcgcctgttaatctacggcgcctcttctcgcgcgaccggcatcccggcgcgtttcagcggcagcggttctggcaccgatttcacgctgaccatctctcgcctggagccagaagactttgccgtgtattactgccaagcctgggacagcaatccggccgttgttttcggccaaggcaccaaagttgagatcaaa

SEQ ID NO: 1020 - DNA, 762 bp, synthetic construct
  source 1..762: mol_type = other DNA
caggtgcagttagttgaaagcggcggtggtgtggtgcaaccgggtcgtagcttacgtttatcttgcgcggcctctggctttacctttagcagctatgcgatgcattgggtgcgtcaggcgccaggtaagggcttagagtgggtggcggttatctcttatgacggtagcaacaagtactacgccgatagcgttaaaggccgcttcacgattagccgcgacaacagcaaaaataccttatacttacagatgaattctttacgcgccgaggatacggccgtttattattgtgccaaagactggggttggtaccgcggttacggtcatgcgggtgccgtggacatttggggccagtggggtcaaggtaccctggtgaccgtttcttctggtggtagctctcgcagcagcagctctggcggcggtggcagcggcggtggcggcgagattgtgctgacccagagcccggcgacgttaagcttatctccgggcgaacgcgcgacgttatcttgccgcgcctctcagtctgtgtctagctcttatctggcctggtaccagcaaaaaccaggtcaggcgccgcgcctgttaatctacggcgcctcttctcgcgcgaccggcatcccggcgcgtttcagcggcagcggttctggcaccgatttcacgctgaccatctctcgcctggagccagaagactttgccgtgtattactgccaacaatacaataatccgttattcacgttcggccaaggcaccaaagttgagatcaaa

SEQ ID NO: 1021 - DNA, 762 bp, synthetic construct
  source 1..762: mol_type = other DNA
caggtgcagttagttgaaagcggcggtggtgtggtgcaaccgggtcgtagcttacgtttatcttgcgcggcctctggctttacctttagcagctatgcgatgcattgggtgcgtcaggcgccaggtaagggcttagagtgggtggcggttatctcttatgacggtagcaacaagtactacgccgatagcgttaaaggccgcttcacgattagccgcgacaacagcaaaaataccttatacttacagatgaattctttacgcgccgaggatacggccgtttattattgtgccaaagactggggttggtaccgcggttacggtcatgcgggtgccgtggacatttggggccagtggggtcaaggtaccctggtgaccgtttcttctggtggtagctctcgcagcagcagctctggcggcggtggcagcggcggtggcggcgagattgtgctgacccagagcccggcgacgttaagcttatctccgggcgaacgcgcgacgttatcttgccgcgcctctcagtctgtgtctagctcttatctggcctggtaccagcaaaaaccaggtcaggcgccgcgcctgttaatctacggcgcctcttctcgcgcgaccggcatcccggcgcgtttcagcggcagcggttctggcaccgatttcacgctgaccatctctcgcctggagccagaagactttgccgtgtattactgccaacaatacaatagcagcttatggacgttcggtcagggtaccaaagtggagatcaaa

SEQ ID NO: 1022 - DNA, 762 bp, synthetic construct
  source 1..762: mol_type = other DNA
caggtgcagttagttgaaagcggcggtggtgtggtgcaaccgggtcgtagcttacgtttatcttgcgcggcctctggctttacctttagcagctatgcgatgcattgggtgcgtcaggcgccaggtaagggcttagagtgggtggcggttatctcttatgacggtagcaacaagtactacgccgatagcgttaaaggccgcttcacgattagccgcgacaacagcaaaaataccttatacttacagatgaattctttacgcgccgaggatacggccgtttattattgtgccaaagactggggttggtaccgcggttacggtcatgcgggtgccgtggacatttggggccagtggggtcaaggtaccctggtgaccgtttcttctggtggtagctctcgcagcagcagctctggcggcggtggcagcggcggtggcggcgagattgtgctgacccagagcccggcgacgttaagcttatctccgggcgaacgcgcgacgttatcttgccgcgcctctcagtctgtgtctagctcttatctggcctggtaccagcaaaaaccaggtcaggcgccgcgcctgttaatctacggcgcctcttctcgcgcgaccggcatcccggcgcgtttcagcggcagcggttctggcaccgatttcacgctgaccatctctcgcctggagccagaagactttgccgtgtattactgccaaacgtgggacagctttggccaagttttcggtcagggtaccaaagtggagatcaaa

SEQ ID NO: 1023 - DNA, 765 bp, synthetic construct
  source 1..765: mol_type = other DNA
caggtgcagttagttgaaagcggcggtggtgtggtgcaaccgggtcgtagcttacgtttatcttgcgcggcctctggctttacctttagcagctatgcgatgcattgggtgcgtcaggcgccaggtaagggcttagagtgggtggcggttatctcttatgacggtagcaacaagtactacgccgatagcgttaaaggccgcttcacgattagccgcgacaacagcaaaaataccttatacttacagatgaattctttacgcgccgaggatacggccgtttattattgtgccaaagactggggttggtaccgcggttacggtcatgcgggtgccgtggacatttggggccagtggggtcaaggtaccctggtgaccgtttcttctggtggtagctctcgcagcagcagctctggcggcggtggcagcggcggtggcggcgagattgtgctgacccagagcccggcgacgttaagcttatctccgggcgaacgcgcgacgttatcttgccgcgcctctcagtctgtgtctagctcttatctggcctggtaccagcaaaaaccaggtcaggcgccgcgcctgttaatctacggcgcctcttctcgcgcgaccggcatcccggcgcgtttcagcggcagcggttctggcaccgatttcacgctgaccatctctcgcctggagccagaagactttgccgtgtattactgctcttcttacgcgagcaatacgcacgttaagtttggtcagggcaccaaggttgagattaaa

SEQ ID NO: 1024 - DNA, 768 bp, synthetic construct
  source 1..768: mol_type = other DNA
caggtgcagttagttgaaagcggcggtggtgtggtgcaaccgggtcgtagcttacgtttatcttgcgcggcctctggctttacctttagcagctatgcgatgcattgggtgcgtcaggcgccaggtaagggcttagagtgggtggcggttatctcttatgacggtagcaacaagtactacgccgatagcgttaaaggccgcttcacgattagccgcgacaacagcaaaaataccttatacttacagatgaattctttacgcgccgaggatacggccgtttattattgtgccaaagactggggttggtaccgcggttacggtcatgcgggtgccgtggacatttggggccagtggggtcaaggtaccctggtgaccgtttcttctggtggtagctctcgcagcagcagctctggcggcggtggcagcggcggtggcggcgagattgtgctgacccagagcccggcgacgttaagcttatctccgggcgaacgcgcgacgttatcttgccgcgcctctcagtctgtgtctagctcttatctggcctggtaccagcaaaaaccaggtcaggcgccgcgcctgttaatctacggcgcctcttctcgcgcgaccggcatcccggcgcgtttcagcggcagcggttctggcaccgatttcacgctgaccatctctcgcctggagccagaagactttgccgtgtattactgctcttcttacaccagcagctctacgcacgttgtgttcggccagggcacgaaggttgaaatcaaa

SEQ ID NO: 1025 - DNA, 750 bp, synthetic construct
  source 1..750: mol_type = other DNA
caggtgcagttagttgaaagcggcggtggtgtggtgcaaccgggtcgtagcttacgtttatcttgcgcggcctctggctttacctttagcagctatgcgatgcattgggtgcgtcaggcgccaggtaagggcttagagtgggtggcggttatctcttatgacggtagcaacaagtactacgccgatagcgttaaaggccgcttcacgattagccgcgacaacagcaaaaataccttatacttacagatgaattctttacgcgccgaggatacggccgtttattattgtgccaaagagacgacgggtatcggtgcctttgattactggggtcagtggggtcagggcaccttagttacggtgagcagcggcggttcttctcgctctagctcttctggcggcggcggtagcggcggtggcggcgaaatcgtgctgacgcagagcccggcgaccctgagcctgtctccaggcgagcgcgcgaccctgtcttgccgcgcctctcagtctgtttctagctcttatttagcgtggtaccagcagaagccaggccaagcgccacgcctgctgatttacggcgcctcttctcgtgccacgggtatcccggcgcgtttcagcggcagcggtagcggcaccgacttcaccctgaccatctctcgtctggagccagaggatttcgccgtgtactattgtcagcagcgcagcaactggtggccagccattacctttggtcaaggtacgaaagttgaaattaaa

SEQ ID NO: 1026 - DNA, 750 bp, synthetic construct
  source 1..750: mol_type = other DNA
caggtgcagttagttgaaagcggcggtggtgtggtgcaaccgggtcgtagcttacgtttatcttgcgcggcctctggctttacctttagcagctatgcgatgcattgggtgcgtcaggcgccaggtaagggcttagagtgggtggcggttatctcttatgacggtagcaacaagtactacgccgatagcgttaaaggccgcttcacgattagccgcgacaacagcaaaaataccttatacttacagatgaattctttacgcgccgaggatacggccgtttattattgtgccaaagagacgacgggtatcggtgcctttgattactggggtcagtggggtcagggcaccttagttacggtgagcagcggcggttcttctcgctctagctcttctggcggcggcggtagcggcggtggcggcgaaatcgtgctgacgcagagcccggcgaccctgagcctgtctccaggcgagcgcgcgaccctgtcttgccgcgcctctcagtctgtttctagctcttatttagcgtggtaccagcagaagccaggccaagcgccacgcctgctgatttacggcgcctcttctcgtgccacgggtatcccggcgcgtttcagcggcagcggtagcggcaccgacttcaccctgaccatctctcgtctggagccagaggatttcgccgtgtactattgtcaggtgtgggacagctcttctcaccattgggtgtttggtcaaggtacgaaagttgaaattaaa

SEQ ID NO: 1027 - DNA, 744 bp, synthetic construct
  source 1..744: mol_type = other DNA
caggtgcagttagttgaaagcggcggtggtgtggtgcaaccgggtcgtagcttacgtttatcttgcgcggcctctggctttacctttagcagctatgcgatgcattgggtgcgtcaggcgccaggtaagggcttagagtgggtggcggttatctcttatgacggtagcaacaagtactacgccgatagcgttaaaggccgcttcacgattagccgcgacaacagcaaaaataccttatacttacagatgaattctttacgcgccgaggatacggccgtttattattgtgccaaaggtttcttatcttctgccttagattattggggtcaatggggccaaggcaccctggttacggttagcagcggcggctcttctcgctcttctagctctggtggcggcggctctggcggcggtggcgaaattgttctgacccaaagcccggcgaccctgagcctgagcccaggtgaacgcgccaccctgagctgtcgtgcctctcaaagcgtttcttctagctacctggcctggtatcaacagaaaccaggtcaggccccgcgcttactgatttatggtgcgtcttctcgcgcgacgggtatcccagcgcgtttttctggcagcggctctggcaccgatttcacgctgaccatttctcgcctggaaccagaggactttgccgtttattactgccaacattatcacaattctgttccagtgacctttggtcaaggtacgaaagttgaaattaaa

SEQ ID NO: 1028 - DNA, 747 bp, synthetic construct
  source 1..747: mol_type = other DNA
caggtgcagttagttgaaagcggcggtggtgtggtgcaaccgggtcgtagcttacgtttatcttgcgcggcctctggctttacctttagcagctatgcgatgcattgggtgcgtcaggcgccaggtaagggcttagagtgggtggcggttatctcttatgacggtagcaacaagtactacgccgatagcgttaaaggccgcttcacgattagccgcgacaacagcaaaaataccttatacttacagatgaattctttacgcgccgaggatacggccgtttattattgtgccaaaggtttcttatcttctgccttagattattggggtcaatggggccaaggcaccctggttacggttagcagcggcggctcttctcgctcttctagctctggtggcggcggctctggcggcggtggcgaaattgttctgacccaaagcccggcgaccctgagcctgagcccaggtgaacgcgccaccctgagctgtcgtgcctctcaaagcgtttcttctagctacctggcctggtatcaacagaaaccaggtcaggccccgcgcttactgatttatggtgcgtcttctcgcgcgacgggtatcccagcgcgtttttctggcagcggctctggcaccgatttcacgctgaccatttctcgcctggaaccagaggactttgccgtttattactgccaacagcgttctaattggccaccagcctttaattttggtcaaggtacgaaagttgaaattaaa

SEQ ID NO: 1029 - DNA, 744 bp, synthetic construct
  source 1..744: mol_type = other DNA
caggtgcagttagttgaaagcggcggtggtgtggtgcaaccgggtcgtagcttacgtttatcttgcgcggcctctggctttacctttagcagctatgcgatgcattgggtgcgtcaggcgccaggtaagggcttagagtgggtggcggttatctcttatgacggtagcaacaagtactacgccgatagcgttaaaggccgcttcacgattagccgcgacaacagcaaaaataccttatacttacagatgaattctttacgcgccgaggatacggccgtttattattgtgccaaaggtttcttatcttctgccttagattattggggtcaatggggccaaggcaccctggttacggttagcagcggcggctcttctcgctcttctagctctggtggcggcggctctggcggcggtggcgaaattgttctgacccaaagcccggcgaccctgagcctgagcccaggtgaacgcgccaccctgagctgtcgtgcctctcaaagcgtttcttctagctacctggcctggtatcaacagaaaccaggtcaggccccgcgcttactgatttatggtgcgtcttctcgcgcgacgggtatcccagcgcgtttttctggcagcggctctggcaccgatttcacgctgaccatttctcgcctggaaccagaggactttgccgtttattactgccaacagtatggtagcccatctggtctgacctttggtcaaggtacgaaagttgaaattaaa

SEQ ID NO: 1030 - DNA, 753 bp, synthetic construct
  source 1..753: mol_type = other DNA
caggtgcagttagttgaaagcggcggtggtgtggtgcaaccgggtcgtagcttacgtttatcttgcgcggcctctggctttacctttagcagctatgcgatgcattgggtgcgtcaggcgccaggtaagggcttagagtgggtggcggttatctcttatgacggtagcaacaagtactacgccgatagcgttaaaggccgcttcacgattagccgcgacaacagcaaaaataccttatacttacagatgaattctttacgcgccgaggatacggccgtttattattgtgccaaaggtggttgggcctacatcttcgactattggggccaatggggtcagggtaccctggtgacggtttctagcggcggcagctctcgctcttcttctagcggtggtggcggcagcggtggcggcggtgaaattgtgttaacccagtctccggcgaccctgagcctgagcccgggtgagcgtgccacgctgagctgccgcgcgtctcaatctgtgtcttcttcttatttagcgtggtaccagcaaaaaccgggtcaagcgccacgtttattaatttatggcgccagctctcgcgccaccggtatcccagcccgttttagcggtagcggcagcggtaccgattttacgttaaccattagccgcttagaaccggaggacttcgcggtttactattgtggcacgtgggatagctctagcggtgacggtgcgggcgtgttcggtcaaggtaccaaggtggaaattaaa

SEQ ID NO: 1031 - DNA, 753 bp, synthetic construct
  source 1..753: mol_type = other DNA
caggtgcagttagttgaaagcggcggtggtgtggtgcaaccgggtcgtagcttacgtttatcttgcgcggcctctggctttacctttagcagctatgcgatgcattgggtgcgtcaggcgccaggtaagggcttagagtgggtggcggttatctcttatgacggtagcaacaagtactacgccgatagcgttaaaggccgcttcacgattagccgcgacaacagcaaaaataccttatacttacagatgaattctttacgcgccgaggatacggccgtttattattgtgccaaaggtcactcttctacgtacgttattgattactggggtcagtggggtcagggcaccttagttacggtgagcagcggcggttcttctcgctctagctcttctggcggcggcggtagcggcggtggcggcgaaatcgtgctgacgcagagcccggcgaccctgagcctgtctccaggcgagcgcgcgaccctgtcttgccgcgcctctcagtctgtttctagctcttatttagcgtggtaccagcagaagccaggccaagcgccacgcctgctgatttacggcgcctcttctcgtgccacgggtatcccggcgcgtttcagcggcagcggtagcggcaccgacttcaccctgaccatctctcgtctggagccagaggatttcgccgtgtactattgtggcacctgggacagctctttatctagcgcggcggttttcggtcaaggcacgaaagtggaaatcaaa

SEQ ID NO: 1032 - DNA, 747 bp, synthetic construct
  source 1..747: mol_type = other DNA
caggtgcagttagttgaaagcggcggtggtgtggtgcaaccgggtcgtagcttacgtttatcttgcgcggcctctggctttacctttagcagctatgcgatgcattgggtgcgtcaggcgccaggtaagggcttagagtgggtggcggttatctcttatgacggtagcaacaagtactacgccgatagcgttaaaggccgcttcacgattagccgcgacaacagcaaaaataccttatacttacagatgaattctttacgcgccgaggatacggccgtttattattgtgccaaaggttctccatctggtttatacagcctggacttctggggccaatggggccagggcacgttagttaccgtgagcagcggtggttcttctcgcagctcttctagcggcggcggtggcagcggtggcggcggcgagattgtgttaacccagagcccggcgaccctgagcttatctccgggtgagcgtgcgaccttaagctgtcgcgccagccaatctgttagctctagctacctggcctggtatcagcaaaagccgggtcaggccccacgtctgctgatctatggtgcctctagccgcgccacgggtattccggcgcgctttagcggctctggcagcggcacggactttaccctgacgatcagccgtttagagccagaagacttcgcggtttattactgccagcaatataacaacggtccgattaccttcggtcaaggtaccaaggtggaaattaaa

SEQ ID NO: 1033 - DNA, 750 bp, synthetic construct
  source 1..750: mol_type = other DNA
caggtgcagttagttgaaagcggcggtggtgtggtgcaaccgggtcgtagcttacgtttatcttgcgcggcctctggctttacctttagcagctatgcgatgcattgggtgcgtcaggcgccaggtaagggcttagagtgggtggcggttatctcttatgacggtagcaacaagtactacgccgatagcgttaaaggccgcttcacgattagccgcgacaacagcaaaaataccttatacttacagatgaattctttacgcgccgaggatacggccgtttattattgtgccaaaggttacggtccagccaacgcctttgattactggggtcagtggggtcagggcaccttagttacggtgagcagcggcggttcttctcgctctagctcttctggcggcggcggtagcggcggtggcggcgaaatcgtgctgacgcagagcccggcgaccctgagcctgtctccaggcgagcgcgcgaccctgtcttgccgcgcctctcagtctgtttctagctcttatttagcgtggtaccagcagaagccaggccaagcgccacgcctgctgatttacggcgcctcttctcgtgccacgggtatcccggcgcgtttcagcggcagcggtagcggcaccgacttcaccctgaccatctctcgtctggagccagaggatttcgccgtgtactattgtagcagctacacctcttcttctagccatctggttttcggtcaaggcacgaaagtggaaatcaaa

SEQ ID NO: 1034 - DNA, 750 bp, synthetic construct
  source 1..750: mol_type = other DNA
caggtgcagttagttgaaagcggcggtggtgtggtgcaaccgggtcgtagcttacgtttatcttgcgcggcctctggctttacctttagcagctatgcgatgcattgggtgcgtcaggcgccaggtaagggcttagagtgggtggcggttatctcttatgacggtagcaacaagtactacgccgatagcgttaaaggccgcttcacgattagccgcgacaacagcaaaaataccttatacttacagatgaattctttacgcgccgaggatacggccgtttattattgtgccaaaatggactcttactacgcctacggtctggatttctggggtcagtggggtcagggcaccttagttacggtgagcagcggcggttcttctcgctctagctcttctggcggcggcggtagcggcggtggcggcgaaatcgtgctgacgcagagcccggcgaccctgagcctgtctccaggcgagcgcgcgaccctgtcttgccgcgcctctcagtctgtttctagctcttatttagcgtggtaccagcagaagccaggccaagcgccacgcctgctgatttacggcgcctcttctcgtgccacgggtatcccggcgcgtttcagcggcagcggtagcggcaccgacttcaccctgaccatctctcgtctggagccagaggatttcgccgtgtactattgtagcagctacacctctacgaacaccctggtgttcggtcaaggtaccaaggtggaaattaaa

SEQ ID NO: 1035 - DNA, 738 bp, synthetic construct
  source 1..738: mol_type = other DNA
caggtgcagttagttgaaagcggcggtggtgtggtgcaaccgggtcgtagcttacgtttatcttgcgcggcctctggctttacctttagcagctatgcgatgcattgggtgcgtcaggcgccaggtaagggcttagagtgggtggcggttatctcttatgacggtagcaacaagtactacgccgatagcgttaaaggccgcttcacgattagccgcgacaacagcaaaaataccttatacttacagatgaattctttacgcgccgaggatacggccgtttattattgtgccaaacaaaacgccatctctttagactattggggccaatggggtcagggtaccctggtgacggtttctagcggcggcagctctcgctcttcttctagcggtggtggcggcagcggtggcggcggtgaaattgtgttaacccagtctccggcgaccctgagcctgagcccgggtgagcgtgccacgctgagctgccgcgcgtctcaatctgtgtcttcttcttatttagcgtggtaccagcaaaaaccgggtcaagcgccacgtttattaatttatggcgccagctctcgcgccaccggtatcccagcccgttttagcggtagcggcagcggtaccgattttacgttaaccattagccgcttagaaccggaggacttcgcggtttactattgtatgcagggtacccattggcacctggccttcggtcagggcaccaaggttgagatcaaa

SEQ ID NO: 1036 - DNA, 741 bp, synthetic construct
  source 1..741: mol_type = other DNA
caggtgcagttagttgaaagcggcggtggtgtggtgcaaccgggtcgtagcttacgtttatcttgcgcggcctctggctttacctttagcagctatgcgatgcattgggtgcgtcaggcgccaggtaagggcttagagtgggtggcggttatctcttatgacggtagcaacaagtactacgccgatagcgttaaaggccgcttcacgattagccgcgacaacagcaaaaataccttatacttacagatgaattctttacgcgccgaggatacggccgtttattattgtgccaaacaaaacgccatctctttagactattggggccaatggggtcagggtaccctggtgacggtttctagcggcggcagctctcgctcttcttctagcggtggtggcggcagcggtggcggcggtgaaattgtgttaacccagtctccggcgaccctgagcctgagcccgggtgagcgtgccacgctgagctgccgcgcgtctcaatctgtgtcttcttcttatttagcgtggtaccagcaaaaaccgggtcaagcgccacgtttattaatttatggcgccagctctcgcgccaccggtatcccagcccgttttagcggtagcggcagcggtaccgattttacgttaaccattagccgcttagaaccggaggacttcgcggtttactattgtaccacgtgggatagcttaaatggtgaggtttttggccagggtacgaaggttgaaatcaaa

SEQ ID NO: 1037 - DNA, 744 bp, synthetic construct
  source 1..744: mol_type = other DNA
caggtgcagttagttgaaagcggcggtggtgtggtgcaaccgggtcgtagcttacgtttatcttgcgcggcctctggctttacctttagcagctatgcgatgcattgggtgcgtcaggcgccaggtaagggcttagagtgggtggcggttatctcttatgacggtagcaacaagtactacgccgatagcgttaaaggccgcttcacgattagccgcgacaacagcaaaaataccttatacttacagatgaattctttacgcgccgaggatacggccgtttattattgtgccaaacgcgccaacggtcacacgacgtttgattactggggtcagtggggtcagggcaccttagttacggtgagcagcggcggttcttctcgctctagctcttctggcggcggcggtagcggcggtggcggcgaaatcgtgctgacgcagagcccggcgaccctgagcctgtctccaggcgagcgcgcgaccctgtcttgccgcgcctctcagtctgtttctagctcttatttagcgtggtaccagcagaagccaggccaagcgccacgcctgctgatttacggcgcctcttctcgtgccacgggtatcccggcgcgtttcagcggcagcggtagcggcaccgacttcaccctgaccatctctcgtctggagccagaggatttcgccgtgtactattgtcagacctggggtaccggtatccgcgtgtttggccaaggtacgaaggtggagattaaa

SEQ ID NO: 1038 - DNA, 750 bp, synthetic construct
  source 1..750: mol_type = other DNA
caggtgcagttagttgaaagcggcggtggtgtggtgcaaccgggtcgtagcttacgtttatcttgcgcggcctctggctttacctttagcagctatgcgatgcattgggtgcgtcaggcgccaggtaagggcttagagtgggtggcggttatctcttatgacggtagcaacaagtactacgccgatagcgttaaaggccgcttcacgattagccgcgacaacagcaaaaataccttatacttacagatgaattctttacgcgccgaggatacggccgtttattattgtgccaaacgccacgacgccttatgggccttcgattattggggtcaatggggccaaggcaccctggttacggttagcagcggcggctcttctcgctcttctagctctggtggcggcggctctggcggcggtggcgaaattgttctgacccaaagcccggcgaccctgagcctgagcccaggtgaacgcgccaccctgagctgtcgtgcctctcaaagcgtttcttctagctacctggcctggtatcaacagaaaccaggtcaggccccgcgcttactgatttatggtgcgtcttctcgcgcgacgggtatcccagcgcgtttttctggcagcggctctggcaccgatttcacgctgaccatttctcgcctggaaccagaggactttgccgtttattactgcggtacctgggattctcgtatgggtgcctgggtttttggccagggtacgaaggttgaaatcaaa

SEQ ID NO: 1039 - DNA, 759 bp, synthetic construct
  source 1..759: mol_type = other DNA
caggtgcagttagttgaaagcggcggtggtgtggtgcaaccgggtcgtagcttacgtttatcttgcgcggcctctggctttacctttagcagctatgcgatgcattgggtgcgtcaggcgccaggtaagggcttagagtgggtggcggttatctcttatgacggtagcaacaagtactacgccgatagcgttaaaggccgcttcacgattagccgcgacaacagcaaaaataccttatacttacagatgaattctttacgcgccgaggatacggccgtttattattgtgccaaacgcccaccaatctcttggggtccagcgtttgactactggggccaatggggccagggcacgttagttaccgtgagcagcggtggttcttctcgcagctcttctagcggcggcggtggcagcggtggcggcggcgagattgtgttaacccagagcccggcgaccctgagcttatctccgggtgagcgtgcgaccttaagctgtcgcgccagccaatctgttagctctagctacctggcctggtatcagcaaaagccgggtcaggccccacgtctgctgatctatggtgcctctagccgcgccacgggtattccggcgcgctttagcggctctggcagcggcacggactttaccctgacgatcagccgtttagagccagaagacttcgcggtttattactgccaggcctgggattcttctttaaataatctgtgggttttcggtcaaggcacgaaagtggaaatcaaa

SEQ ID NO: 1040 - DNA, 783 bp, synthetic construct
  source 1..783: mol_type = other DNA
caggtgcagttagttgaaagcggcggtggtgtggtgcaaccgggtcgtagcttacgtttatcttgcgcggcctctggctttacctttagcagctatgcgatgcattgggtgcgtcaggcgccaggtaagggcttagagtgggtggcggttatctcttatgacggtagcaacaagtactacgccgatagcgttaaaggccgcttcacgattagccgcgacaacagcaaaaataccttatacttacagatgaattctttacgcgccgaggatacggccgtttattattgtgccaaatctgacgagtaccgcgccgttggcccgtacgactattggtcttatgcggcgttcgactactggggccagtggggccagggtacgttagttacggtgtcttctggcggcagctctcgtagctctagcagcggcggtggcggctctggcggcggcggcgaaattgtgctgacgcaaagcccagccaccctgagcttaagcccaggtgagcgtgccacgttaagctgtcgtgccagccaaagcgtgtcttctagctacctggcctggtaccagcagaaaccaggccaagccccacgtttattaatctacggcgcgagctctcgtgcgaccggtattccggcgcgcttcagcggcagcggttctggcaccgacttcacgctgacgatcagccgcctggagccggaagactttgccgtttactattgccagtcttacgactctagcttaagcggcagctacgttttcggccaaggtaccaaggtggaaattaaa

SEQ ID NO: 1041 - DNA, 741 bp, synthetic construct
  source 1..741: mol_type = other DNA
caggtgcagttagttgaaagcggcggtggtgtggtgcaaccgggtcgtagcttacgtttatcttgcgcggcctctggctttacctttagcagctatgcgatgcattgggtgcgtcaggcgccaggtaagggcttagagtgggtggcggttatctcttatgacggtagcaacaagtactacgccgatagcgttaaaggccgcttcacgattagccgcgacaacagcaaaaataccttatacttacagatgaattctttacgcgccgaggatacggccgtttattattgtgccaaatctatcggttggatcggtttagactattggggccaatggggtcagggtaccctggtgacggtttctagcggcggcagctctcgctcttcttctagcggtggtggcggcagcggtggcggcggtgaaattgtgttaacccagtctccggcgaccctgagcctgagcccgggtgagcgtgccacgctgagctgccgcgcgtctcaatctgtgtcttcttcttatttagcgtggtaccagcaaaaaccgggtcaagcgccacgtttattaatttatggcgccagctctcgcgccaccggtatcccagcccgttttagcggtagcggcagcggtaccgattttacgttaaccattagccgcttagaaccggaggacttcgcggtttactattgtcagcaatatagctctagcttagttgcctttggccagggtacgaaggttgaaatcaaa

SEQ ID NO: 1042 - DNA, 744 bp, synthetic construct
  source 1..744: mol_type = other DNA
caggtgcagttagttgaaagcggcggtggtgtggtgcaaccgggtcgtagcttacgtttatcttgcgcggcctctggctttacctttagcagctatgcgatgcattgggtgcgtcaggcgccaggtaagggcttagagtgggtggcggttatctcttatgacggtagcaacaagtactacgccgatagcgttaaaggccgcttcacgattagccgcgacaacagcaaaaataccttatacttacagatgaattctttacgcgccgaggatacggccgtttattattgtgccaaatctttatggggtggtttcgactactggggccagtggggtcaaggcacgctggtgaccgtttcttctggcggcagcagccgctcttcttcttctggcggtggtggcagcggcggtggcggcgagattgtgctgacgcagagcccagcgaccctgagcctgagcccgggcgagcgcgcgacgttaagctgccgtgccagccaatctgttagctcttcttacctggcctggtatcaacagaagccgggccaagccccgcgcctgttaatctatggcgcgtctagccgcgccacgggcatcccagcccgctttagcggctctggcagcggcacggattttaccttaacgattagccgtttagagccggaagacttcgccgtgtactactgccaagtgtgggagagcagcaaccatttagttgtttttggccagggtacgaaggttgaaatcaaa

SEQ ID NO: 1043 - DNA, 762 bp, synthetic construct
  source 1..762: mol_type = other DNA
caggtgcagttagttgaaagcggcggtggtgtggtgcaaccgggtcgtagcttacgtttatcttgcgcggcctctggctttacctttagcagctatgcgatgcattgggtgcgtcaggcgccaggtaagggcttagagtgggtggcggttatctcttatgacggtagcaacaagtactacgccgatagcgttaaaggccgcttcacgattagccgcgacaacagcaaaaataccttatacttacagatgaattctttacgcgccgaggatacggccgtttattattgtgccaaatacgtttactacggttcttacctgcgttacgccatggatccatggggccagtggggccaaggtacgctggtgaccgtgtcttctggtggttctagccgctctagcagcagcggtggcggcggtagcggcggcggtggcgaaatcgtgctgacccagagcccggcgaccttatctctgtctccaggcgaacgtgccaccttatcttgtcgtgcctctcaaagcgttagctctagctacctggcgtggtaccaacagaagccgggtcaagcgccgcgtttactgatctacggtgcgtcttctcgcgccaccggcattccagcgcgtttttctggcagcggctctggtaccgattttacgttaaccatttctcgcttagaaccagaggatttcgcggtttattattgtgcggcctctgacgatagcctgaactcttgggttttcggccaaggcaccaaagttgagatcaaa

SEQ ID NO: 1044 - DNA, 753 bp, synthetic construct
  source 1..753: mol_type = other DNA
caggtgcagttagttgaaagcggcggtggtgtggtgcaaccgggtcgtagcttacgtttatcttgcgcggcctctggctttacctttagcagctatgcgatgcattgggtgcgtcaggcgccaggtaagggcttagagtgggtggcggttatctcttatgacggtagcaacaagtactacgccgatagcgttaaaggccgcttcacgattagccgcgacaacagcaaaaataccttatacttacagatgaattctttacgcgccgaggatacggccgtttattattgtgcccgtgccggtggttctggttctttctatcgtttattcgattactggggccagtggggccaaggtacgctggtgaccgtgtcttctggtggttctagccgctctagcagcagcggtggcggcggtagcggcggcggtggcgaaatcgtgctgacccagagcccggcgaccttatctctgtctccaggcgaacgtgccaccttatcttgtcgtgcctctcaaagcgttagctctagctacctggcgtggtaccaacagaagccgggtcaagcgccgcgtttactgatctacggtgcgtcttctcgcgccaccggcattccagcgcgtttttctggcagcggctctggtaccgattttacgttaaccatttctcgcttagaaccagaggatttcgcggtttattattgtcagcaatcttacggcattccgttaacgttcggtcagggtaccaaagtggagatcaaa

SEQ ID NO: 1045 - DNA, 735 bp, synthetic construct
  source 1..735: mol_type = other DNA
caggtgcagttagttgaaagcggcggtggtgtggtgcaaccgggtcgtagcttacgtttatcttgcgcggcctctggctttacctttagcagctatgcgatgcattgggtgcgtcaggcgccaggtaagggcttagagtgggtggcggttatctcttatgacggtagcaacaagtactacgccgatagcgttaaaggccgcttcacgattagccgcgacaacagcaaaaataccttatacttacagatgaattctttacgcgccgaggatacggccgtttattattgtgcccgtgcctctgccgacgactactggggtcagtggggccaaggtaccttagtgaccgtgtcttctggtggcagcagccgttcttcttcttctggtggcggtggtagcggcggcggtggcgaaatcgtgctgacccaaagcccggccaccctgagcctgagcccgggcgaacgcgccaccttatcttgccgtgcgtctcagtctgtttctagctcttacttagcgtggtaccagcaaaaaccaggccaggccccacgtttactgatctacggcgcgagctctcgtgccacgggtattccagcccgcttcagcggcagcggtagcggcaccgactttaccctgacgatcagccgtctggagccagaagatttcgccgtttattactgtagctcttatacgagcagctctctgcgcgttttcggccagggcacgaaggttgagattaaa

SEQ ID NO: 1046 - DNA, 744 bp, synthetic construct
  source 1..744: mol_type = other DNA
caggtgcagttagttgaaagcggcggtggtgtggtgcaaccgggtcgtagcttacgtttatcttgcgcggcctctggctttacctttagcagctatgcgatgcattgggtgcgtcaggcgccaggtaagggcttagagtgggtggcggttatctcttatgacggtagcaacaagtactacgccgatagcgttaaaggccgcttcacgattagccgcgacaacagcaaaaataccttatacttacagatgaattctttacgcgccgaggatacggccgtttattattgtgcccgtgcctacacgggtcgctctggtctggattactggggtcagtggggtcagggcaccttagttacggtgagcagcggcggttcttctcgctctagctcttctggcggcggcggtagcggcggtggcggcgaaatcgtgctgacgcagagcccggcgaccctgagcctgtctccaggcgagcgcgcgaccctgtcttgccgcgcctctcagtctgtttctagctcttatttagcgtggtaccagcagaagccaggccaagcgccacgcctgctgatttacggcgcctcttctcgtgccacgggtatcccggcgcgtttcagcggcagcggtagcggcaccgacttcaccctgaccatctctcgtctggagccagaggatttcgccgtgtactattgtcagcagtactattctacgccatttccgtttggtcaaggtacgaaagttgaaattaaa

SEQ ID NO: 1047 - DNA, 747 bp, synthetic construct
  source 1..747: mol_type = other DNA
caggtgcagttagttgaaagcggcggtggtgtggtgcaaccgggtcgtagcttacgtttatcttgcgcggcctctggctttacctttagcagctatgcgatgcattgggtgcgtcaggcgccaggtaagggcttagagtgggtggcggttatctcttatgacggtagcaacaagtactacgccgatagcgttaaaggccgcttcacgattagccgcgacaacagcaaaaataccttatacttacagatgaattctttacgcgccgaggatacggccgtttattattgtgcccgtgacgcccgctacgttccagacgatggctggggtcaatggggccaaggcaccctggttacggttagcagcggcggctcttctcgctcttctagctctggtggcggcggctctggcggcggtggcgaaattgttctgacccaaagcccggcgaccctgagcctgagcccaggtgaacgcgccaccctgagctgtcgtgcctctcaaagcgtttcttctagctacctggcctggtatcaacagaaaccaggtcaggccccgcgcttactgatttatggtgcgtcttctcgcgcgacgggtatcccagcgcgtttttctggcagcggctctggcaccgatttcacgctgaccatttctcgcctggaaccagaggactttgccgtttattactgccaagtgtgggattctagctctgaccacgtggtgtttggtcaaggtacgaaagttgaaattaaa

SEQ ID NO: 1048 - DNA, 762 bp, synthetic construct
  source 1..762: mol_type = other DNA
caggtgcagttagttgaaagcggcggtggtgtggtgcaaccgggtcgtagcttacgtttatcttgcgcggcctctggctttacctttagcagctatgcgatgcattgggtgcgtcaggcgccaggtaagggcttagagtgggtggcggttatctcttatgacggtagcaacaagtactacgccgatagcgttaaaggccgcttcacgattagccgcgacaacagcaaaaataccttatacttacagatgaattctttacgcgccgaggatacggccgtttattattgtgcccgtgacgactcttaccgcggtccactgcatggttactttgactattggggccagtggggtcaaggtaccctggtgaccgtttcttctggtggtagctctcgcagcagcagctctggcggcggtggcagcggcggtggcggcgagattgtgctgacccagagcccggcgacgttaagcttatctccgggcgaacgcgcgacgttatcttgccgcgcctctcagtctgtgtctagctcttatctggcctggtaccagcaaaaaccaggtcaggcgccgcgcctgttaatctacggcgcctcttctcgcgcgaccggcatcccggcgcgtttcagcggcagcggttctggcaccgatttcacgctgaccatctctcgcctggagccagaagactttgccgtgtattactgcggtgcctgggagaccagcctgtctggtggtgtttttggtcagggcaccaaggttgagattaaa

SEQ ID NO: 1049 - DNA, 762 bp, synthetic construct
  source 1..762: mol_type = other DNA
caggtgcagttagttgaaagcggcggtggtgtggtgcaaccgggtcgtagcttacgtttatcttgcgcggcctctggctttacctttagcagctatgcgatgcattgggtgcgtcaggcgccaggtaagggcttagagtgggtggcggttatctcttatgacggtagcaacaagtactacgccgatagcgttaaaggccgcttcacgattagccgcgacaacagcaaaaataccttatacttacagatgaattctttacgcgccgaggatacggccgtttattattgtgcccgtgacgactcttaccgcggtccactgcatggttactttgactattggggccagtggggtcaaggtaccctggtgaccgtttcttctggtggtagctctcgcagcagcagctctggcggcggtggcagcggcggtggcggcgagattgtgctgacccagagcccggcgacgttaagcttatctccgggcgaacgcgcgacgttatcttgccgcgcctctcagtctgtgtctagctcttatctggcctggtaccagcaaaaaccaggtcaggcgccgcgcctgttaatctacggcgcctcttctcgcgcgaccggcatcccggcgcgtttcagcggcagcggttctggcaccgatttcacgctgaccatctctcgcctggagccagaagactttgccgtgtattactgccaagtttgggacagcagcagcgaccacggtgtttttggtcagggcaccaaggttgagattaaa

SEQ ID NO: 1050 - DNA, 777 bp, synthetic construct
  source 1..777: mol_type = other DNA
caggtgcagttagttgaaagcggcggtggtgtggtgcaaccgggtcgtagcttacgtttatcttgcgcggcctctggctttacctttagcagctatgcgatgcattgggtgcgtcaggcgccaggtaagggcttagagtgggtggcggttatctcttatgacggtagcaacaagtactacgccgatagcgttaaaggccgcttcacgattagccgcgacaacagcaaaaataccttatacttacagatgaattctttacgcgccgaggatacggccgtttattattgtgcccgtgacggtttaggttaccgcaacctgtttggttctcatgttagccgttggtttgacgtttggggtcagtggggccagggcacgttagttacggttagctctggtggcagcagccgcagcagctctagcggcggcggtggcagcggtggcggcggcgaaattgtgctgacccaatctccggccacgctgagcctgtctccgggtgagcgcgcgacgttatcttgccgcgcgtctcagtctgtgagctcttcttatttagcgtggtaccaacagaaaccgggtcaggccccacgcctgttaatctacggtgcgagcagccgcgcgaccggcatcccggcgcgtttctctggcagcggctctggtaccgatttcacgttaaccatctctcgtttagaaccagaagatttcgcggtttactactgccagagctacgactcttctctgtctgatgtggtgttcggtcaaggcacgaaggtggagattaaa

SEQ ID NO: 1051 - DNA, 774 bp, synthetic construct
  source 1..774: mol_type = other DNA
caggtgcagttagttgaaagcggcggtggtgtggtgcaaccgggtcgtagcttacgtttatcttgcgcggcctctggctttacctttagcagctatgcgatgcattgggtgcgtcaggcgccaggtaagggcttagagtgggtggcggttatctcttatgacggtagcaacaagtactacgccgatagcgttaaaggccgcttcacgattagccgcgacaacagcaaaaataccttatacttacagatgaattctttacgcgccgaggatacggccgtttattattgtgcccgtgacggttacttctaccgccgcaatgtgacgacgtattacagcagctatatggactactggggtcagtggggccagggcacgttagttacggttagctctggtggcagcagccgcagcagctctagcggcggcggtggcagcggtggcggcggcgaaattgtgctgacccaatctccggccacgctgagcctgtctccgggtgagcgcgcgacgttatcttgccgcgcgtctcagtctgtgagctcttcttatttagcgtggtaccaacagaaaccgggtcaggccccacgcctgttaatctacggtgcgagcagccgcgcgaccggcatcccggcgcgtttctctggcagcggctctggtaccgatttcacgttaaccatctctcgtttagaaccagaagatttcgcggtttactactgccaggcgtgggactctcgctctctggttgtgtttggccaaggtacgaaagttgagattaaa

SEQ ID NO: 1052 - DNA, 771 bp, synthetic construct
  source 1..771: mol_type = other DNA
caggtgcagttagttgaaagcggcggtggtgtggtgcaaccgggtcgtagcttacgtttatcttgcgcggcctctggctttacctttagcagctatgcgatgcattgggtgcgtcaggcgccaggtaagggcttagagtgggtggcggttatctcttatgacggtagcaacaagtactacgccgatagcgttaaaggccgcttcacgattagccgcgacaacagcaaaaataccttatacttacagatgaattctttacgcgccgaggatacggccgtttattattgtgcccgtgacggttacttctaccgccgcaatgtgacgacgtattacagcagctatatggactactggggtcagtggggccagggcacgttagttacggttagctctggtggcagcagccgcagcagctctagcggcggcggtggcagcggtggcggcggcgaaattgtgctgacccaatctccggccacgctgagcctgtctccgggtgagcgcgcgacgttatcttgccgcgcgtctcagtctgtgagctcttcttatttagcgtggtaccaacagaaaccgggtcaggccccacgcctgttaatctacggtgcgagcagccgcgcgaccggcatcccggcgcgtttctctggcagcggctctggtaccgatttcacgttaaccatctctcgtttagaaccagaagatttcgcggtttactactgccagcaggccaagtctttcccgttaacctttggccaaggtacgaaagttgagattaaa

SEQ ID NO: 1053 - DNA, 771 bp, synthetic construct
  source 1..771: mol_type = other DNA
caggtgcagttagttgaaagcggcggtggtgtggtgcaaccgggtcgtagcttacgtttatcttgcgcggcctctggctttacctttagcagctatgcgatgcattgggtgcgtcaggcgccaggtaagggcttagagtgggtggcggttatctcttatgacggtagcaacaagtactacgccgatagcgttaaaggccgcttcacgattagccgcgacaacagcaaaaataccttatacttacagatgaattctttacgcgccgaggatacggccgtttattattgtgcccgtgacggttacttctaccgccgcaatgtgacgacgtattacagcagctatatggactactggggtcagtggggccagggcacgttagttacggttagctctggtggcagcagccgcagcagctctagcggcggcggtggcagcggtggcggcggcgaaattgtgctgacccaatctccggccacgctgagcctgtctccgggtgagcgcgcgacgttatcttgccgcgcgtctcagtctgtgagctcttcttatttagcgtggtaccaacagaaaccgggtcaggccccacgcctgttaatctacggtgcgagcagccgcgcgaccggcatcccggcgcgtttctctggcagcggctctggtaccgatttcacgttaaccatctctcgtttagaaccagaagatttcgcggtttactactgccagcagtactgtgcctctccgcaaacctttggccaaggtacgaaagttgagattaaa

SEQ ID NO: 1054 - DNA, 777 bp, synthetic construct
  source 1..777: mol_type = other DNA
caggtgcagttagttgaaagcggcggtggtgtggtgcaaccgggtcgtagcttacgtttatcttgcgcggcctctggctttacctttagcagctatgcgatgcattgggtgcgtcaggcgccaggtaagggcttagagtgggtggcggttatctcttatgacggtagcaacaagtactacgccgatagcgttaaaggccgcttcacgattagccgcgacaacagcaaaaataccttatacttacagatgaattctttacgcgccgaggatacggccgtttattattgtgcccgtgacggttacttctaccgccgcaatgtgacgacgtattacagcagctatatggactactggggtcagtggggccagggcacgttagttacggttagctctggtggcagcagccgcagcagctctagcggcggcggtggcagcggtggcggcggcgaaattgtgctgacccaatctccggccacgctgagcctgtctccgggtgagcgcgcgacgttatcttgccgcgcgtctcagtctgtgagctcttcttatttagcgtggtaccaacagaaaccgggtcaggccccacgcctgttaatctacggtgcgagcagccgcgcgaccggcatcccggcgcgtttctctggcagcggctctggtaccgatttcacgttaaccatctctcgtttagaaccagaagatttcgcggtttactactgccagcagtacggttcttggccactggccgtgacctttggtcaaggtaccaaggttgaaatcaaa

SEQ ID NO: 1055 - DNA, 777 bp, synthetic construct
  source 1..777: mol_type = other DNA
caggtgcagttagttgaaagcggcggtggtgtggtgcaaccgggtcgtagcttacgtttatcttgcgcggcctctggctttacctttagcagctatgcgatgcattgggtgcgtcaggcgccaggtaagggcttagagtgggtggcggttatctcttatgacggtagcaacaagtactacgccgatagcgttaaaggccgcttcacgattagccgcgacaacagcaaaaataccttatacttacagatgaattctttacgcgccgaggatacggccgtttattattgtgcccgtgacggttacttctaccgccgcaatgtgacgacgtattacagcagctatatggactactggggtcagtggggccagggcacgttagttacggttagctctggtggcagcagccgcagcagctctagcggcggcggtggcagcggtggcggcggcgaaattgtgctgacccaatctccggccacgctgagcctgtctccgggtgagcgcgcgacgttatcttgccgcgcgtctcagtctgtgagctcttcttatttagcgtggtaccaacagaaaccgggtcaggccccacgcctgttaatctacggtgcgagcagccgcgcgaccggcatcccggcgcgtttctctggcagcggctctggtaccgatttcacgttaaccatctctcgtttagaaccagaagatttcgcggtttactactgccaggtgtgggactcttctacggatttagtggtgtttggtcaaggtaccaaggttgaaatcaaa

SEQ ID NO: 1056 - DNA, 750 bp, synthetic construct
  source 1..750: mol_type = other DNA
caggtgcagttagttgaaagcggcggtggtgtggtgcaaccgggtcgtagcttacgtttatcttgcgcggcctctggctttacctttagcagctatgcgatgcattgggtgcgtcaggcgccaggtaagggcttagagtgggtggcggttatctcttatgacggtagcaacaagtactacgccgatagcgttaaaggccgcttcacgattagccgcgacaacagcaaaaataccttatacttacagatgaattctttacgcgccgaggatacggccgtttattattgtgcccgtgaccaccgcttagttccagttgcggcgcaattatattggggtcagtggggccagggtacgttagtgaccgtgagctctggtggttcttctcgttcttctagcagcggcggtggcggctctggcggcggcggtgaaattgttctgacccagagcccggcgaccctgtctttaagcccaggtgaacgtgcgacgctgtcttgtcgcgcgtctcaatctgtgtctagctcttatttagcgtggtatcaacaaaaaccaggccaagccccgcgtctgttaatttacggtgccagctctcgcgccacgggcattccggcccgttttagcggtagcggcagcggtacggattttaccttaacgattagccgcttagagccggaggactttgccgtgtactattgccaacagtcttactctccgccgattacgttcggtcaaggcacgaaagtggaaatcaaa

SEQ ID NO: 1057 - DNA, 744 bp, synthetic construct
  source 1..744: mol_type = other DNA
caggtgcagttagttgaaagcggcggtggtgtggtgcaaccgggtcgtagcttacgtttatcttgcgcggcctctggctttacctttagcagctatgcgatgcattgggtgcgtcaggcgccaggtaagggcttagagtgggtggcggttatctcttatgacggtagcaacaagtactacgccgatagcgttaaaggccgcttcacgattagccgcgacaacagcaaaaataccttatacttacagatgaattctttacgcgccgaggatacggccgtttattattgtgcccgtgacttacactactacgttgccatggatgtgtggggtcaatggggccaaggcaccctggttacggttagcagcggcggctcttctcgctcttctagctctggtggcggcggctctggcggcggtggcgaaattgttctgacccaaagcccggcgaccctgagcctgagcccaggtgaacgcgccaccctgagctgtcgtgcctctcaaagcgtttcttctagctacctggcctggtatcaacagaaaccaggtcaggccccgcgcttactgatttatggtgcgtcttctcgcgcgacgggtatcccagcgcgtttttctggcagcggctctggcaccgatttcacgctgaccatttctcgcctggaaccagaggactttgccgtttattactgcatgcaaggcacccacccgccaccaacgtttggccagggtacgaaggttgaaatcaaa

SEQ ID NO: 1058 - DNA, 768 bp, synthetic construct
  source 1..768: mol_type = other DNA
caggtgcagttagttgaaagcggcggtggtgtggtgcaaccgggtcgtagcttacgtttatcttgcgcggcctctggctttacctttagcagctatgcgatgcattgggtgcgtcaggcgccaggtaagggcttagagtgggtggcggttatctcttatgacggtagcaacaagtactacgccgatagcgttaaaggccgcttcacgattagccgcgacaacagcaaaaataccttatacttacagatgaattctttacgcgccgaggatacggccgtttattattgtgcccgtgacttacgcggttaccgcggtggcggcacgtacgatgcctttgatgtgtggggtcaatggggtcagggcaccctggttacggtttcttctggcggttctagccgtagctctagcagcggtggcggcggctctggcggcggtggcgaaattgtgctgacccagagcccagccaccttatctctgagcccgggtgaacgcgccacgctgtcttgtcgcgcgtctcagtctgtgtctagcagctacttagcgtggtaccagcaaaagccgggccaggccccgcgcttattaatttacggtgcctctagccgtgcgacgggcattccggcccgttttagcggttctggcagcggcacggactttaccttaacgatcagccgcttagaaccagaagactttgcggtttattactgtggtacctgggatagctctttatctgccggcgtttttggccagggtacgaaggtggagatcaaa

SEQ ID NO: 1059 - DNA, 744 bp, synthetic construct
  source 1..744: mol_type = other DNA
caggtgcagttagttgaaagcggcggtggtgtggtgcaaccgggtcgtagcttacgtttatcttgcgcggcctctggctttacctttagcagctatgcgatgcattgggtgcgtcaggcgccaggtaagggcttagagtgggtggcggttatctcttatgacggtagcaacaagtactacgccgatagcgttaaaggccgcttcacgattagccgcgacaacagcaaaaataccttatacttacagatgaattctttacgcgccgaggatacggccgtttattattgtgcccgtgacccatctggtcacggtatggacgtgtggggccaatggggtcagggtaccctggtgacggtttctagcggcggcagctctcgctcttcttctagcggtggtggcggcagcggtggcggcggtgaaattgtgttaacccagtctccggcgaccctgagcctgagcccgggtgagcgtgccacgctgagctgccgcgcgtctcaatctgtgtcttcttcttatttagcgtggtaccagcaaaaaccgggtcaagcgccacgtttattaatttatggcgccagctctcgcgccaccggtatcccagcccgttttagcggtagcggcagcggtaccgattttacgttaaccattagccgcttagaaccggaggacttcgcggtttactattgtcaggcctgggatagcacgagcccatgggttttcggccagggcacgaaggttgagattaaa

SEQ ID NO: 1060 - DNA, 744 bp, synthetic construct
  source 1..744: mol_type = other DNA
caggtgcagttagttgaaagcggcggtggtgtggtgcaaccgggtcgtagcttacgtttatcttgcgcggcctctggctttacctttagcagctatgcgatgcattgggtgcgtcaggcgccaggtaagggcttagagtgggtggcggttatctcttatgacggtagcaacaagtactacgccgatagcgttaaaggccgcttcacgattagccgcgacaacagcaaaaataccttatacttacagatgaattctttacgcgccgaggatacggccgtttattattgtgcccgtgacccatctggttctttagactattggggccaatggggtcagggtaccctggtgacggtttctagcggcggcagctctcgctcttcttctagcggtggtggcggcagcggtggcggcggtgaaattgtgttaacccagtctccggcgaccctgagcctgagcccgggtgagcgtgccacgctgagctgccgcgcgtctcaatctgtgtcttcttcttatttagcgtggtaccagcaaaaaccgggtcaagcgccacgtttattaatttatggcgccagctctcgcgccaccggtatcccagcccgttttagcggtagcggcagcggtaccgattttacgttaaccattagccgcttagaaccggaggacttcgcggtttactattgtcaggtttggcagggcacgaattctttagttgtgtttggccaaggtacgaaggtggagattaaa

SEQ ID NO: 1061 - DNA, 780 bp, synthetic construct
  source 1..780: mol_type = other DNA
caggtgcagttagttgaaagcggcggtggtgtggtgcaaccgggtcgtagcttacgtttatcttgcgcggcctctggctttacctttagcagctatgcgatgcattgggtgcgtcaggcgccaggtaagggcttagagtgggtggcggttatctcttatgacggtagcaacaagtactacgccgatagcgttaaaggccgcttcacgattagccgcgacaacagcaaaaataccttatacttacagatgaattctttacgcgccgaggatacggccgtttattattgtgcccgtgacccaacgggttaccgcttaagcagcttatactattacgcgggctttgcctacggtatggatgtgtggggccagtggggtcaaggtacgttagtgacggttagcagcggcggtagcagccgcagcagcagctctggcggcggtggcagcggcggcggcggcgaaattgttttaacccaatctccggcgaccttaagcttatctccaggcgagcgcgccaccttaagctgtcgtgccagccagtctgttagctctagctacttagcgtggtatcagcaaaaaccaggtcaagcgccacgcttattaatttatggcgccagcagccgtgccaccggcattccagcccgttttagcggttctggcagcggtacggactttacgttaaccatcagccgcctggaaccagaagacttcgccgtgtattattgtgagacgtgggacagcaacacccaggtgttcggtcaaggcacgaaggtggagattaaa

SEQ ID NO: 1062 - DNA, 765 bp, synthetic construct
  source 1..765: mol_type = other DNA
caggtgcagttagttgaaagcggcggtggtgtggtgcaaccgggtcgtagcttacgtttatcttgcgcggcctctggctttacctttagcagctatgcgatgcattgggtgcgtcaggcgccaggtaagggcttagagtgggtggcggttatctcttatgacggtagcaacaagtactacgccgatagcgttaaaggccgcttcacgattagccgcgacaacagcaaaaataccttatacttacagatgaattctttacgcgccgaggatacggccgtttattattgtgcccgtgaccaaacgtactacgactctagcctgtcttacggctacgcgtttgatatctggggtcaatggggccagggcaccttagttacggtttctagcggtggtagcagccgttctagcagctctggcggcggcggtagcggcggtggcggcgaaattgtgctgacccagtctccagcgacgttaagcctgagcccaggcgagcgcgccaccttatcttgtcgtgccagccaaagcgttagcagctcttacctggcctggtatcaacaaaaaccgggccaagcgccacgcttactgatctacggtgccagcagccgtgccaccggcattccagcgcgtttttctggtagcggcagcggtacggattttacgttaacgatttctcgcctggagccggaggattttgccgtgtactactgtgaaacctgggattctaacacgcgcgtgttcggccagggcacgaaggttgaaatcaaa

SEQ ID NO: 1063 - DNA, 765 bp, synthetic construct
  source 1..765: mol_type = other DNA
caggtgcagttagttgaaagcggcggtggtgtggtgcaaccgggtcgtagcttacgtttatcttgcgcggcctctggctttacctttagcagctatgcgatgcattgggtgcgtcaggcgccaggtaagggcttagagtgggtggcggttatctcttatgacggtagcaacaagtactacgccgatagcgttaaaggccgcttcacgattagccgcgacaacagcaaaaataccttatacttacagatgaattctttacgcgccgaggatacggccgtttattattgtgcccgtgaccgcggttaccgcggttactatgcgggtaactggtttgacccgtggggccagtggggtcaaggtaccctggtgaccgtttcttctggtggtagctctcgcagcagcagctctggcggcggtggcagcggcggtggcggcgagattgtgctgacccagagcccggcgacgttaagcttatctccgggcgaacgcgcgacgttatcttgccgcgcctctcagtctgtgtctagctcttatctggcctggtaccagcaaaaaccaggtcaggcgccgcgcctgttaatctacggcgcctcttctcgcgcgaccggcatcccggcgcgtttcagcggcagcggttctggcaccgatttcacgctgaccatctctcgcctggagccagaagactttgccgtgtattactgcggtacgtgggacagcagcctgtcttctggtgtttttggtcagggcaccaaggttgagattaaa

SEQ ID NO: 1064 - DNA, 768 bp, synthetic construct
  source 1..768: mol_type = other DNA
caggtgcagttagttgaaagcggcggtggtgtggtgcaaccgggtcgtagcttacgtttatcttgcgcggcctctggctttacctttagcagctatgcgatgcattgggtgcgtcaggcgccaggtaagggcttagagtgggtggcggttatctcttatgacggtagcaacaagtactacgccgatagcgttaaaggccgcttcacgattagccgcgacaacagcaaaaataccttatacttacagatgaattctttacgcgccgaggatacggccgtttattattgtgcccgtgaccgcggttaccgcggttactatgcgggtaactggtttgacccgtggggccagtggggtcaaggtaccctggtgaccgtttcttctggtggtagctctcgcagcagcagctctggcggcggtggcagcggcggtggcggcgagattgtgctgacccagagcccggcgacgttaagcttatctccgggcgaacgcgcgacgttatcttgccgcgcctctcagtctgtgtctagctcttatctggcctggtaccagcaaaaaccaggtcaggcgccgcgcctgttaatctacggcgcctcttctcgcgcgaccggcatcccggcgcgtttcagcggcagcggttctggcaccgatttcacgctgaccatctctcgcctggagccagaagactttgccgtgtattactgcggtgtttgggacagcagcagcgaccactctgttgtgttcggccagggcacgaaggttgaaatcaaa

SEQ ID NO: 1065 - DNA, 744 bp, synthetic construct
  source 1..744: mol_type = other DNA
caggtgcagttagttgaaagcggcggtggtgtggtgcaaccgggtcgtagcttacgtttatcttgcgcggcctctggctttacctttagcagctatgcgatgcattgggtgcgtcaggcgccaggtaagggcttagagtgggtggcggttatctcttatgacggtagcaacaagtactacgccgatagcgttaaaggccgcttcacgattagccgcgacaacagcaaaaataccttatacttacagatgaattctttacgcgccgaggatacggccgtttattattgtgcccgtgaccgcatcgttccagccggtagcgattactggggtcagtggggtcagggcaccttagttacggtgagcagcggcggttcttctcgctctagctcttctggcggcggcggtagcggcggtggcggcgaaatcgtgctgacgcagagcccggcgaccctgagcctgtctccaggcgagcgcgcgaccctgtcttgccgcgcctctcagtctgtttctagctcttatttagcgtggtaccagcagaagccaggccaagcgccacgcctgctgatttacggcgcctcttctcgtgccacgggtatcccggcgcgtttcagcggcagcggtagcggcaccgacttcaccctgaccatctctcgtctggagccagaggatttcgccgtgtactattgtcagcagcgctattctccaaactttacctttggtcaaggtacgaaagttgaaattaaa

SEQ ID NO: 1066 - DNA, 744 bp, synthetic construct
  source 1..744: mol_type = other DNA
caggtgcagttagttgaaagcggcggtggtgtggtgcaaccgggtcgtagcttacgtttatcttgcgcggcctctggctttacctttagcagctatgcgatgcattgggtgcgtcaggcgccaggtaagggcttagagtgggtggcggttatctcttatgacggtagcaacaagtactacgccgatagcgttaaaggccgcttcacgattagccgcgacaacagcaaaaataccttatacttacagatgaattctttacgcgccgaggatacggccgtttattattgtgcccgtgaccgcatcgttccagccggtagcgattactggggtcagtggggtcagggcaccttagttacggtgagcagcggcggttcttctcgctctagctcttctggcggcggcggtagcggcggtggcggcgaaatcgtgctgacgcagagcccggcgaccctgagcctgtctccaggcgagcgcgcgaccctgtcttgccgcgcctctcagtctgtttctagctcttatttagcgtggtaccagcagaagccaggccaagcgccacgcctgctgatttacggcgcctcttctcgtgccacgggtatcccggcgcgtttcagcggcagcggtagcggcaccgacttcaccctgaccatctctcgtctggagccagaggatttcgccgtgtactattgtcagcagtactatcgcgcctctcagagctttggtcaaggtacgaaagttgaaattaaa

SEQ ID NO: 1067 - DNA, 750 bp, synthetic construct
  source 1..750: mol_type = other DNA
caggtgcagttagttgaaagcggcggtggtgtggtgcaaccgggtcgtagcttacgtttatcttgcgcggcctctggctttacctttagcagctatgcgatgcattgggtgcgtcaggcgccaggtaagggcttagagtgggtggcggttatctcttatgacggtagcaacaagtactacgccgatagcgttaaaggccgcttcacgattagccgcgacaacagcaaaaataccttatacttacagatgaattctttacgcgccgaggatacggccgtttattattgtgcccgtgaccgcaaggacttccgcatggacgtgtggggccaatggggtcagggtaccctggtgacggtttctagcggcggcagctctcgctcttcttctagcggtggtggcggcagcggtggcggcggtgaaattgtgttaacccagtctccggcgaccctgagcctgagcccgggtgagcgtgccacgctgagctgccgcgcgtctcaatctgtgtcttcttcttatttagcgtggtaccagcaaaaaccgggtcaagcgccacgtttattaatttatggcgccagctctcgcgccaccggtatcccagcccgttttagcggtagcggcagcggtaccgattttacgttaaccattagccgcttagaaccggaggacttcgcggtttactattgtggcacgtgggataattctctgaacacgggtggcgtgtttggtcaaggtacgaaagttgaaattaaa

SEQ ID NO: 1068 - DNA, 747 bp, synthetic construct
  source 1..747: mol_type = other DNA
caggtgcagttagttgaaagcggcggtggtgtggtgcaaccgggtcgtagcttacgtttatcttgcgcggcctctggctttacctttagcagctatgcgatgcattgggtgcgtcaggcgccaggtaagggcttagagtgggtggcggttatctcttatgacggtagcaacaagtactacgccgatagcgttaaaggccgcttcacgattagccgcgacaacagcaaaaataccttatacttacagatgaattctttacgcgccgaggatacggccgtttattattgtgcccgtgaccgcaagtctacgccaccagattattggggtcaatggggccaaggcaccctggttacggttagcagcggcggctcttctcgctcttctagctctggtggcggcggctctggcggcggtggcgaaattgttctgacccaaagcccggcgaccctgagcctgagcccaggtgaacgcgccaccctgagctgtcgtgcctctcaaagcgtttcttctagctacctggcctggtatcaacagaaaccaggtcaggccccgcgcttactgatttatggtgcgtcttctcgcgcgacgggtatcccagcgcgtttttctggcagcggctctggcaccgatttcacgctgaccatttctcgcctggaaccagaggactttgccgtttattactgctctagctatgacagctcttctggtaataaagtgttcggtcaaggtaccaaggtggaaattaaa

SEQ ID NO: 1069 - DNA, 741 bp, synthetic construct
  source 1..741: mol_type = other DNA
caggtgcagttagttgaaagcggcggtggtgtggtgcaaccgggtcgtagcttacgtttatcttgcgcggcctctggctttacctttagcagctatgcgatgcattgggtgcgtcaggcgccaggtaagggcttagagtgggtggcggttatctcttatgacggtagcaacaagtactacgccgatagcgttaaaggccgcttcacgattagccgcgacaacagcaaaaataccttatacttacagatgaattctttacgcgccgaggatacggccgtttattattgtgcccgtgaccgccgcgacttaacgttagattattggggtcaatggggccaaggcaccctggttacggttagcagcggcggctcttctcgctcttctagctctggtggcggcggctctggcggcggtggcgaaattgttctgacccaaagcccggcgaccctgagcctgagcccaggtgaacgcgccaccctgagctgtcgtgcctctcaaagcgtttcttctagctacctggcctggtatcaacagaaaccaggtcaggccccgcgcttactgatttatggtgcgtcttctcgcgcgacgggtatcccagcgcgtttttctggcagcggctctggcaccgatttcacgctgaccatttctcgcctggaaccagaggactttgccgtttattactgccaagcgtgggattctagcgacgttgtttttggccagggtacgaaggttgaaatcaaa

SEQ ID NO: 1070 - DNA, 747 bp, synthetic construct
  source 1..747: mol_type = other DNA
caggtgcagttagttgaaagcggcggtggtgtggtgcaaccgggtcgtagcttacgtttatcttgcgcggcctctggctttacctttagcagctatgcgatgcattgggtgcgtcaggcgccaggtaagggcttagagtgggtggcggttatctcttatgacggtagcaacaagtactacgccgatagcgttaaaggccgcttcacgattagccgcgacaacagcaaaaataccttatacttacagatgaattctttacgcgccgaggatacggccgtttattattgtgcccgtgaccgccgcgacttaacgttagattattggggtcaatggggccaaggcaccctggttacggttagcagcggcggctcttctcgctcttctagctctggtggcggcggctctggcggcggtggcgaaattgttctgacccaaagcccggcgaccctgagcctgagcccaggtgaacgcgccaccctgagctgtcgtgcctctcaaagcgtttcttctagctacctggcctggtatcaacagaaaccaggtcaggccccgcgcttactgatttatggtgcgtcttctcgcgcgacgggtatcccagcgcgtttttctggcagcggctctggcaccgatttcacgctgaccatttctcgcctggaaccagaggactttgccgtttattactgccaagtgtgggattctagccacgacggtgtggtgtttggtcaaggtacgaaagttgaaattaaa

SEQ ID NO: 1071 - DNA, 792 bp, synthetic construct
  source 1..792: mol_type = other DNA
caggtgcagttagttgaaagcggcggtggtgtggtgcaaccgggtcgtagcttacgtttatcttgcgcggcctctggctttacctttagcagctatgcgatgcattgggtgcgtcaggcgccaggtaagggcttagagtgggtggcggttatctcttatgacggtagcaacaagtactacgccgatagcgttaaaggccgcttcacgattagccgcgacaacagcaaaaataccttatacttacagatgaattctttacgcgccgaggatacggccgtttattattgtgcccgtgactctggtggttaccgctctccggtgtactacgattactattatcgtgagtctgaccgttatggcatggatgtttggggtcaatggggtcaaggcacgttagtgaccgtgtctagcggcggtagcagccgttctagcagctctggcggcggcggcagcggcggcggcggtgagattgttttaacccagagcccagcgacgttatctctgtctccaggtgaacgcgcgacgctgtcttgccgtgcctctcagtctgtgtcttctagctatctggcctggtatcaacaaaagccgggtcaagccccacgtctgctgatctatggcgcgtctagccgtgcgacgggtattccggcgcgcttcagcggctctggttctggcacggactttacgctgacgattagccgcctggagccagaggattttgcggtttactactgtcagcaagcgctgagctcttctccatggaccttcggtcagggtaccaaagtggagatcaaa

SEQ ID NO: 1072 - DNA, 777 bp, synthetic construct
  source 1..777: mol_type = other DNA
caggtgcagttagttgaaagcggcggtggtgtggtgcaaccgggtcgtagcttacgtttatcttgcgcggcctctggctttacctttagcagctatgcgatgcattgggtgcgtcaggcgccaggtaagggcttagagtgggtggcggttatctcttatgacggtagcaacaagtactacgccgatagcgttaaaggccgcttcacgattagccgcgacaacagcaaaaataccttatacttacagatgaattctttacgcgccgaggatacggccgtttattattgtgcccgtgactctggtggttaccgcacgagcggcccatactttcaaggctatgcgatggacgtttggggtcagtggggccagggcacgttagttacggttagctctggtggcagcagccgcagcagctctagcggcggcggtggcagcggtggcggcggcgaaattgtgctgacccaatctccggccacgctgagcctgtctccgggtgagcgcgcgacgttatcttgccgcgcgtctcagtctgtgagctcttcttatttagcgtggtaccaacagaaaccgggtcaggccccacgcctgttaatctacggtgcgagcagccgcgcgaccggcatcccggcgcgtttctctggcagcggctctggtaccgatttcacgttaaccatctctcgtttagaaccagaagatttcgcggtttactactgcgaagcgtggcacgactctggtagcggttttgtgtttggtcaaggtaccaaggttgaaatcaaa

SEQ ID NO: 1073 - DNA, 774 bp, synthetic construct
  source 1..774: mol_type = other DNA
caggtgcagttagttgaaagcggcggtggtgtggtgcaaccgggtcgtagcttacgtttatcttgcgcggcctctggctttacctttagcagctatgcgatgcattgggtgcgtcaggcgccaggtaagggcttagagtgggtggcggttatctcttatgacggtagcaacaagtactacgccgatagcgttaaaggccgcttcacgattagccgcgacaacagcaaaaataccttatacttacagatgaattctttacgcgccgaggatacggccgtttattattgtgcccgtgactctggtggttaccgcacgagcggcccatactttcaaggctatgcgatggacgtttggggtcagtggggccagggcacgttagttacggttagctctggtggcagcagccgcagcagctctagcggcggcggtggcagcggtggcggcggcgaaattgtgctgacccaatctccggccacgctgagcctgtctccgggtgagcgcgcgacgttatcttgccgcgcgtctcagtctgtgagctcttcttatttagcgtggtaccaacagaaaccgggtcaggccccacgcctgttaatctacggtgcgagcagccgcgcgaccggcatcccggcgcgtttctctggcagcggctctggtaccgatttcacgttaaccatctctcgtttagaaccagaagatttcgcggtttactactgccagcagtcttactctacgccgcgcccgacctttggtcaaggtaccaaggttgaaatcaaa

SEQ ID NO: 1074 - DNA, 777 bp, synthetic construct
  source 1..777: mol_type = other DNA
caggtgcagttagttgaaagcggcggtggtgtggtgcaaccgggtcgtagcttacgtttatcttgcgcggcctctggctttacctttagcagctatgcgatgcattgggtgcgtcaggcgccaggtaagggcttagagtgggtggcggttatctcttatgacggtagcaacaagtactacgccgatagcgttaaaggccgcttcacgattagccgcgacaacagcaaaaataccttatacttacagatgaattctttacgcgccgaggatacggccgtttattattgtgcccgtgactctggtggttaccgcacgagcggcccatactttcaaggctatgcgatggacgtttggggtcagtggggccagggcacgttagttacggttagctctggtggcagcagccgcagcagctctagcggcggcggtggcagcggtggcggcggcgaaattgtgctgacccaatctccggccacgctgagcctgtctccgggtgagcgcgcgacgttatcttgccgcgcgtctcagtctgtgagctcttcttatttagcgtggtaccaacagaaaccgggtcaggccccacgcctgttaatctacggtgcgagcagccgcgcgaccggcatcccggcgcgtttctctggcagcggctctggtaccgatttcacgttaaccatctctcgtttagaaccagaagatttcgcggtttactactgccaggtgtgggaccgctcttctagccacgtggtgtttggtcaaggtaccaaggttgaaatcaaa

SEQ ID NO: 1075 - DNA, 777 bp, synthetic construct
  source 1..777: mol_type = other DNA
caggtgcagttagttgaaagcggcggtggtgtggtgcaaccgggtcgtagcttacgtttatcttgcgcggcctctggctttacctttagcagctatgcgatgcattgggtgcgtcaggcgccaggtaagggcttagagtgggtggcggttatctcttatgacggtagcaacaagtactacgccgatagcgttaaaggccgcttcacgattagccgcgacaacagcaaaaataccttatacttacagatgaattctttacgcgccgaggatacggccgtttattattgtgcccgtgactctggtggttaccgcacgagcggcccatactttcaaggctatgcgatggacgtttggggtcagtggggccagggcacgttagttacggttagctctggtggcagcagccgcagcagctctagcggcggcggtggcagcggtggcggcggcgaaattgtgctgacccaatctccggccacgctgagcctgtctccgggtgagcgcgcgacgttatcttgccgcgcgtctcagtctgtgagctcttcttatttagcgtggtaccaacagaaaccgggtcaggccccacgcctgttaatctacggtgcgagcagccgcgcgaccggcatcccggcgcgtttctctggcagcggctctggtaccgatttcacgttaaccatctctcgtttagaaccagaagatttcgcggtttactactgccaggtgtgggactcttcttctgatcacccggtgtttggtcaaggtaccaaggttgaaatcaaa

SEQ ID NO: 1076 - DNA, 747 bp, synthetic construct
  source 1..747: mol_type = other DNA
caggtgcagttagttgaaagcggcggtggtgtggtgcaaccgggtcgtagcttacgtttatcttgcgcggcctctggctttacctttagcagctatgcgatgcattgggtgcgtcaggcgccaggtaagggcttagagtgggtggcggttatctcttatgacggtagcaacaagtactacgccgatagcgttaaaggccgcttcacgattagccgcgacaacagcaaaaataccttatacttacagatgaattctttacgcgccgaggatacggccgtttattattgtgcccgtgactctacgatctactctacggatgtgtggggtcaatggggccaaggcaccctggttacggttagcagcggcggctcttctcgctcttctagctctggtggcggcggctctggcggcggtggcgaaattgttctgacccaaagcccggcgaccctgagcctgagcccaggtgaacgcgccaccctgagctgtcgtgcctctcaaagcgtttcttctagctacctggcctggtatcaacagaaaccaggtcaggccccgcgcttactgatttatggtgcgtcttctcgcgcgacgggtatcccagcgcgtttttctggcagcggctctggcaccgatttcacgctgaccatttctcgcctggaaccagaggactttgccgtttattactgctctagctatacgaatacgaacacgctggtggtgttcggtcaaggtaccaaggtggaaattaaa

SEQ ID NO: 1077 - DNA, 756 bp, synthetic construct
  source 1..756: mol_type = other DNA
caggtgcagttagttgaaagcggcggtggtgtggtgcaaccgggtcgtagcttacgtttatcttgcgcggcctctggctttacctttagcagctatgcgatgcattgggtgcgtcaggcgccaggtaagggcttagagtgggtggcggttatctcttatgacggtagcaacaagtactacgccgatagcgttaaaggccgcttcacgattagccgcgacaacagcaaaaataccttatacttacagatgaattctttacgcgccgaggatacggccgtttattattgtgcccgtgagccataccgcgttcgcttatttcgttacatggactattggggtcagtggggccagggtacgttagtgaccgtgagctctggtggttcttctcgttcttctagcagcggcggtggcggctctggcggcggcggtgaaattgttctgacccagagcccggcgaccctgtctttaagcccaggtgaacgtgcgacgctgtcttgtcgcgcgtctcaatctgtgtctagctcttatttagcgtggtatcaacaaaaaccaggccaagccccgcgtctgttaatttacggtgccagctctcgcgccacgggcattccggcccgttttagcggtagcggcagcggtacggattttaccttaacgattagccgcttagagccggaggactttgccgtgtactattgccaagcgtgggactcttctgatcattatgttttcggtcaaggcacgaaagtggaaatcaaa

SEQ ID NO: 1078 - DNA, 756 bp, synthetic construct
  source 1..756: mol_type = other DNA
caggtgcagttagttgaaagcggcggtggtgtggtgcaaccgggtcgtagcttacgtttatcttgcgcggcctctggctttacctttagcagctatgcgatgcattgggtgcgtcaggcgccaggtaagggcttagagtgggtggcggttatctcttatgacggtagcaacaagtactacgccgatagcgttaaaggccgcttcacgattagccgcgacaacagcaaaaataccttatacttacagatgaattctttacgcgccgaggatacggccgtttattattgtgcccgtgagcaatactactcttcttctggcgcgttagcctttgacatttggggccagtggggtcaaggtaccctggtgaccgtttcttctggtggtagctctcgcagcagcagctctggcggcggtggcagcggcggtggcggcgagattgtgctgacccagagcccggcgacgttaagcttatctccgggcgaacgcgcgacgttatcttgccgcgcctctcagtctgtgtctagctcttatctggcctggtaccagcaaaaaccaggtcaggcgccgcgcctgttaatctacggcgcctcttctcgcgcgaccggcatcccggcgcgtttcagcggcagcggttctggcaccgatttcacgctgaccatctctcgcctggagccagaagactttgccgtgtattactgctcttcttacaccagcagcacggttgttttcggccaaggcaccaaagttgagatcaaa

SEQ ID NO: 1079 - DNA, 750 bp, synthetic construct
  source 1..750: mol_type = other DNA
caggtgcagttagttgaaagcggcggtggtgtggtgcaaccgggtcgtagcttacgtttatcttgcgcggcctctggctttacctttagcagctatgcgatgcattgggtgcgtcaggcgccaggtaagggcttagagtgggtggcggttatctcttatgacggtagcaacaagtactacgccgatagcgttaaaggccgcttcacgattagccgcgacaacagcaaaaataccttatacttacagatgaattctttacgcgccgaggatacggccgtttattattgtgcccgtggtgcctaccgccgcgttccaaaaatgtttgacatctggggccaatggggccagggcacgttagttaccgtgagcagcggtggttcttctcgcagctcttctagcggcggcggtggcagcggtggcggcggcgagattgtgttaacccagagcccggcgaccctgagcttatctccgggtgagcgtgcgaccttaagctgtcgcgccagccaatctgttagctctagctacctggcctggtatcagcaaaagccgggtcaggccccacgtctgctgatctatggtgcctctagccgcgccacgggtattccggcgcgctttagcggctctggcagcggcacggactttaccctgacgatcagccgtttagagccagaagacttcgcggtttattactgccagcaatatggttcttctccgattaccttcggtcaaggtaccaaggtggaaattaaa

SEQ ID NO: 1080 - DNA, 762 bp, synthetic construct
  source 1..762: mol_type = other DNA
caggtgcagttagttgaaagcggcggtggtgtggtgcaaccgggtcgtagcttacgtttatcttgcgcggcctctggctttacctttagcagctatgcgatgcattgggtgcgtcaggcgccaggtaagggcttagagtgggtggcggttatctcttatgacggtagcaacaagtactacgccgatagcgttaaaggccgcttcacgattagccgcgacaacagcaaaaataccttatacttacagatgaattctttacgcgccgaggatacggccgtttattattgtgcccgtggtgactaccgcgttacgggtagcaccacgtactttgaccattggggccagtggggtcaaggtaccctggtgaccgtttcttctggtggtagctctcgcagcagcagctctggcggcggtggcagcggcggtggcggcgagattgtgctgacccagagcccggcgacgttaagcttatctccgggcgaacgcgcgacgttatcttgccgcgcctctcagtctgtgtctagctcttatctggcctggtaccagcaaaaaccaggtcaggcgccgcgcctgttaatctacggcgcctcttctcgcgcgaccggcatcccggcgcgtttcagcggcagcggttctggcaccgatttcacgctgaccatctctcgcctggagccagaagactttgccgtgtattactgccaacaatactatagcagcacgccacgcttaagcttcggccagggcacgaaggttgaaatcaaa

SEQ ID NO: 1081 - DNA, 747 bp, synthetic construct
  source 1..747: mol_type = other DNA
caggtgcagttagttgaaagcggcggtggtgtggtgcaaccgggtcgtagcttacgtttatcttgcgcggcctctggctttacctttagcagctatgcgatgcattgggtgcgtcaggcgccaggtaagggcttagagtgggtggcggttatctcttatgacggtagcaacaagtactacgccgatagcgttaaaggccgcttcacgattagccgcgacaacagcaaaaataccttatacttacagatgaattctttacgcgccgaggatacggccgtttattattgtgcccgtggtggttcttggggttactggatggactactggggccagtggggtcaaggcacgctggtgaccgtttcttctggcggcagcagccgctcttcttcttctggcggtggtggcagcggcggtggcggcgagattgtgctgacgcagagcccagcgaccctgagcctgagcccgggcgagcgcgcgacgttaagctgccgtgccagccaatctgttagctcttcttacctggcctggtatcaacagaagccgggccaagccccgcgcctgttaatctatggcgcgtctagccgcgccacgggcatcccagcccgctttagcggctctggcagcggcacggattttaccttaacgattagccgtttagagccggaagacttcgccgtgtactactgccaacagcgcagcaatccaccgtctttcacgtttggccagggtacgaaggttgaaatcaaa

SEQ ID NO: 1082 - DNA, 741 bp, synthetic construct
  source 1..741: mol_type = other DNA
caggtgcagttagttgaaagcggcggtggtgtggtgcaaccgggtcgtagcttacgtttatcttgcgcggcctctggctttacctttagcagctatgcgatgcattgggtgcgtcaggcgccaggtaagggcttagagtgggtggcggttatctcttatgacggtagcaacaagtactacgccgatagcgttaaaggccgcttcacgattagccgcgacaacagcaaaaataccttatacttacagatgaattctttacgcgccgaggatacggccgtttattattgtgcccgtggtaaggcctggggttggttcgacccatggggccagtggggtcaaggcacgctggtgaccgtttcttctggcggcagcagccgctcttcttcttctggcggtggtggcagcggcggtggcggcgagattgtgctgacgcagagcccagcgaccctgagcctgagcccgggcgagcgcgcgacgttaagctgccgtgccagccaatctgttagctcttcttacctggcctggtatcaacagaagccgggccaagccccgcgcctgttaatctatggcgcgtctagccgcgccacgggcatcccagcccgctttagcggctctggcagcggcacggattttaccttaacgattagccgtttagagccggaagacttcgccgtgtactactgcgagacctgggacagcaattcttgggtgttcggtcaaggcaccaaagttgagatcaaa

SEQ ID NO: 1083 - DNA, 768 bp, synthetic construct
  source 1..768: mol_type = other DNA
caggtgcagttagttgaaagcggcggtggtgtggtgcaaccgggtcgtagcttacgtttatcttgcgcggcctctggctttacctttagcagctatgcgatgcattgggtgcgtcaggcgccaggtaagggcttagagtgggtggcggttatctcttatgacggtagcaacaagtactacgccgatagcgttaaaggccgcttcacgattagccgcgacaacagcaaaaataccttatacttacagatgaattctttacgcgccgaggatacggccgtttattattgtgcccgtggtttacgcggttaccgcggtggcggcacgtacgatgcctttgatgtgtggggtcaatggggtcagggcaccctggttacggtttcttctggcggttctagccgtagctctagcagcggtggcggcggctctggcggcggtggcgaaattgtgctgacccagagcccagccaccttatctctgagcccgggtgaacgcgccacgctgtcttgtcgcgcgtctcagtctgtgtctagcagctacttagcgtggtaccagcaaaagccgggccaggccccgcgcttattaatttacggtgcctctagccgtgcgacgggcattccggcccgttttagcggttctggcagcggcacggactttaccttaacgatcagccgcttagaaccagaagactttgcggtttattactgtggtacctgggatagctctttatctgactgggtgttcggccagggcacgaaggttgaaatcaaa

SEQ ID NO: 1084 - DNA, 771 bp, synthetic construct
  source 1..771: mol_type = other DNA
caggtgcagttagttgaaagcggcggtggtgtggtgcaaccgggtcgtagcttacgtttatcttgcgcggcctctggctttacctttagcagctatgcgatgcattgggtgcgtcaggcgccaggtaagggcttagagtgggtggcggttatctcttatgacggtagcaacaagtactacgccgatagcgttaaaggccgcttcacgattagccgcgacaacagcaaaaataccttatacttacagatgaattctttacgcgccgaggatacggccgtttattattgtgcccgtggtttacgcggttaccgcggtggcggcacgtacgatgcctttgatgtgtggggtcaatggggtcagggcaccctggttacggtttcttctggcggttctagccgtagctctagcagcggtggcggcggctctggcggcggtggcgaaattgtgctgacccagagcccagccaccttatctctgagcccgggtgaacgcgccacgctgtcttgtcgcgcgtctcagtctgtgtctagcagctacttagcgtggtaccagcaaaagccgggccaggccccgcgcttattaatttacggtgcctctagccgtgcgacgggcattccggcccgttttagcggttctggcagcggcacggactttaccttaacgatcagccgcttagaaccagaagactttgcggtttattactgtcaagtgtgggatagctcttctgaccacctgtacgtgtttggccaaggtacgaaagttgagattaaa

SEQ ID NO: 1085 - DNA, 741 bp, synthetic construct
  source 1..741: mol_type = other DNA
caggtgcagttagttgaaagcggcggtggtgtggtgcaaccgggtcgtagcttacgtttatcttgcgcggcctctggctttacctttagcagctatgcgatgcattgggtgcgtcaggcgccaggtaagggcttagagtgggtggcggttatctcttatgacggtagcaacaagtactacgccgatagcgttaaaggccgcttcacgattagccgcgacaacagcaaaaataccttatacttacagatgaattctttacgcgccgaggatacggccgtttattattgtgcccgtggtttacgctggggtgccttcgacatttggggccaatggggtcagggtaccctggtgacggtttctagcggcggcagctctcgctcttcttctagcggtggtggcggcagcggtggcggcggtgaaattgtgttaacccagtctccggcgaccctgagcctgagcccgggtgagcgtgccacgctgagctgccgcgcgtctcaatctgtgtcttcttcttatttagcgtggtaccagcaaaaaccgggtcaagcgccacgtttattaatttatggcgccagctctcgcgccaccggtatcccagcccgttttagcggtagcggcagcggtaccgattttacgttaaccattagccgcttagaaccggaggacttcgcggtttactattgtcagcaaagctattctccgccaatctcttttggccagggtacgaaggttgaaatcaaa

SEQ ID NO: 1086 - DNA, 750 bp, synthetic construct
  source 1..750: mol_type = other DNA
caggtgcagttagttgaaagcggcggtggtgtggtgcaaccgggtcgtagcttacgtttatcttgcgcggcctctggctttacctttagcagctatgcgatgcattgggtgcgtcaggcgccaggtaagggcttagagtgggtggcggttatctcttatgacggtagcaacaagtactacgccgatagcgttaaaggccgcttcacgattagccgcgacaacagcaaaaataccttatacttacagatgaattctttacgcgccgaggatacggccgtttattattgtgcccgtggtttataccgcggtttcggtgtgggcttcgacatttggggtcagtggggccagggtacgttagtgaccgtgagctctggtggttcttctcgttcttctagcagcggcggtggcggctctggcggcggcggtgaaattgttctgacccagagcccggcgaccctgtctttaagcccaggtgaacgtgcgacgctgtcttgtcgcgcgtctcaatctgtgtctagctcttatttagcgtggtatcaacaaaaaccaggccaagccccgcgtctgttaatttacggtgccagctctcgcgccacgggcattccggcccgttttagcggtagcggcagcggtacggattttaccttaacgattagccgcttagagccggaggactttgccgtgtactattgcatgcaaggcgccaacggtccgccggtgttcggtcaaggtaccaaggtggaaattaaa

SEQ ID NO: 1087 - DNA, 753 bp, synthetic construct
  source 1..753: mol_type = other DNA
caggtgcagttagttgaaagcggcggtggtgtggtgcaaccgggtcgtagcttacgtttatcttgcgcggcctctggctttacctttagcagctatgcgatgcattgggtgcgtcaggcgccaggtaagggcttagagtgggtggcggttatctcttatgacggtagcaacaagtactacgccgatagcgttaaaggccgcttcacgattagccgcgacaacagcaaaaataccttatacttacagatgaattctttacgcgccgaggatacggccgtttattattgtgcccgtggtttataccgcggtttcggtgtgggcttcgacatttggggtcagtggggccagggtacgttagtgaccgtgagctctggtggttcttctcgttcttctagcagcggcggtggcggctctggcggcggcggtgaaattgttctgacccagagcccggcgaccctgtctttaagcccaggtgaacgtgcgacgctgtcttgtcgcgcgtctcaatctgtgtctagctcttatttagcgtggtatcaacaaaaaccaggccaagccccgcgtctgttaatttacggtgccagctctcgcgccacgggcattccggcccgttttagcggtagcggcagcggtacggattttaccttaacgattagccgcttagagccggaggactttgccgtgtactattgccaacagtactactctaccaccgcgttaacgttcggtcagggtaccaaagtggagatcaaa

SEQ ID NO: 1088 - DNA, 747 bp, synthetic construct
  source 1..747: mol_type = other DNA
caggtgcagttagttgaaagcggcggtggtgtggtgcaaccgggtcgtagcttacgtttatcttgcgcggcctctggctttacctttagcagctatgcgatgcattgggtgcgtcaggcgccaggtaagggcttagagtgggtggcggttatctcttatgacggtagcaacaagtactacgccgatagcgttaaaggccgcttcacgattagccgcgacaacagcaaaaataccttatacttacagatgaattctttacgcgccgaggatacggccgtttattattgtgcccgtggtccagaggacatgttatctttcgatgtgtggggtcaatggggccaaggcaccctggttacggttagcagcggcggctcttctcgctcttctagctctggtggcggcggctctggcggcggtggcgaaattgttctgacccaaagcccggcgaccctgagcctgagcccaggtgaacgcgccaccctgagctgtcgtgcctctcaaagcgtttcttctagctacctggcctggtatcaacagaaaccaggtcaggccccgcgcttactgatttatggtgcgtcttctcgcgcgacgggtatcccagcgcgtttttctggcagcggctctggcaccgatttcacgctgaccatttctcgcctggaaccagaggactttgccgtttattactgccaagcgctggacagctctacgggtgtggtgtttggtcaaggtacgaaagttgaaattaaa

SEQ ID NO: 1089 - DNA, 750 bp, synthetic construct
  source 1..750: mol_type = other DNA
caggtgcagttagttgaaagcggcggtggtgtggtgcaaccgggtcgtagcttacgtttatcttgcgcggcctctggctttacctttagcagctatgcgatgcattgggtgcgtcaggcgccaggtaagggcttagagtgggtggcggttatctcttatgacggtagcaacaagtactacgccgatagcgttaaaggccgcttcacgattagccgcgacaacagcaaaaataccttatacttacagatgaattctttacgcgccgaggatacggccgtttattattgtgcccgtggtcgcgactctggttctttcattattgactactggggccaatggggccagggcacgttagttaccgtgagcagcggtggttcttctcgcagctcttctagcggcggcggtggcagcggtggcggcggcgagattgtgttaacccagagcccggcgaccctgagcttatctccgggtgagcgtgcgaccttaagctgtcgcgccagccaatctgttagctctagctacctggcctggtatcagcaaaagccgggtcaggccccacgtctgctgatctatggtgcctctagccgcgccacgggtattccggcgcgctttagcggctctggcagcggcacggactttaccctgacgatcagccgtttagagccagaagacttcgcggtttattactgccaggcctgggattcttactctacccatgtgttcggtcaaggtaccaaggtggaaattaaa

SEQ ID NO: 1090 - DNA, 753 bp, synthetic construct
  source 1..753: mol_type = other DNA
caggtgcagttagttgaaagcggcggtggtgtggtgcaaccgggtcgtagcttacgtttatcttgcgcggcctctggctttacctttagcagctatgcgatgcattgggtgcgtcaggcgccaggtaagggcttagagtgggtggcggttatctcttatgacggtagcaacaagtactacgccgatagcgttaaaggccgcttcacgattagccgcgacaacagcaaaaataccttatacttacagatgaattctttacgcgccgaggatacggccgtttattattgtgcccgtggtcgccaaggtttcgcctctggcggcgttgacctgtggggtcagtggggccagggtacgttagtgaccgtgagctctggtggttcttctcgttcttctagcagcggcggtggcggctctggcggcggcggtgaaattgttctgacccagagcccggcgaccctgtctttaagcccaggtgaacgtgcgacgctgtcttgtcgcgcgtctcaatctgtgtctagctcttatttagcgtggtatcaacaaaaaccaggccaagccccgcgtctgttaatttacggtgccagctctcgcgccacgggcattccggcccgttttagcggtagcggcagcggtacggattttaccttaacgattagccgcttagagccggaggactttgccgtgtactattgccaagtgtgggaccgcaacagcgatcgtgttttcggtcaaggcacgaaagtggaaatcaaa

SEQ ID NO: 1091 - DNA, 753 bp, synthetic construct
  source 1..753: mol_type = other DNA
caggtgcagttagttgaaagcggcggtggtgtggtgcaaccgggtcgtagcttacgtttatcttgcgcggcctctggctttacctttagcagctatgcgatgcattgggtgcgtcaggcgccaggtaagggcttagagtgggtggcggttatctcttatgacggtagcaacaagtactacgccgatagcgttaaaggccgcttcacgattagccgcgacaacagcaaaaataccttatacttacagatgaattctttacgcgccgaggatacggccgtttattattgtgcccgtggtcgctaccgcggtttcggtgtgggcttcgacatttggggtcagtggggccagggtacgttagtgaccgtgagctctggtggttcttctcgttcttctagcagcggcggtggcggctctggcggcggcggtgaaattgttctgacccagagcccggcgaccctgtctttaagcccaggtgaacgtgcgacgctgtcttgtcgcgcgtctcaatctgtgtctagctcttatttagcgtggtatcaacaaaaaccaggccaagccccgcgtctgttaatttacggtgccagctctcgcgccacgggcattccggcccgttttagcggtagcggcagcggtacggattttaccttaacgattagccgcttagagccggaggactttgccgtgtactattgccaagcgtgggactctaacagcgcggtggttttcggtcaaggcacgaaagtggaaatcaaa

SEQ ID NO: 1092 - DNA, 762 bp, synthetic construct
  source 1..762: mol_type = other DNA
caggtgcagttagttgaaagcggcggtggtgtggtgcaaccgggtcgtagcttacgtttatcttgcgcggcctctggctttacctttagcagctatgcgatgcattgggtgcgtcaggcgccaggtaagggcttagagtgggtggcggttatctcttatgacggtagcaacaagtactacgccgatagcgttaaaggccgcttcacgattagccgcgacaacagcaaaaataccttatacttacagatgaattctttacgcgccgaggatacggccgtttattattgtgcccgtggttcttaccgcacgtcttctagcaaacaatacctggacccgtggggccagtggggtcaaggtaccctggtgaccgtttcttctggtggtagctctcgcagcagcagctctggcggcggtggcagcggcggtggcggcgagattgtgctgacccagagcccggcgacgttaagcttatctccgggcgaacgcgcgacgttatcttgccgcgcctctcagtctgtgtctagctcttatctggcctggtaccagcaaaaaccaggtcaggcgccgcgcctgttaatctacggcgcctcttctcgcgcgaccggcatcccggcgcgtttcagcggcagcggttctggcaccgatttcacgctgaccatctctcgcctggagccagaagactttgccgtgtattactgccaatcttacgatagcaatttatctggtccagtgttcggccagggcacgaaggttgaaatcaaa

SEQ ID NO: 1093 - DNA, 762 bp, synthetic construct
  source 1..762: mol_type = other DNA
caggtgcagttagttgaaagcggcggtggtgtggtgcaaccgggtcgtagcttacgtttatcttgcgcggcctctggctttacctttagcagctatgcgatgcattgggtgcgtcaggcgccaggtaagggcttagagtgggtggcggttatctcttatgacggtagcaacaagtactacgccgatagcgttaaaggccgcttcacgattagccgcgacaacagcaaaaataccttatacttacagatgaattctttacgcgccgaggatacggccgtttattattgtgcccgtggttcttaccgcacgtcttctagcaaacaatacctggacccgtggggccagtggggtcaaggtaccctggtgaccgtttcttctggtggtagctctcgcagcagcagctctggcggcggtggcagcggcggtggcggcgagattgtgctgacccagagcccggcgacgttaagcttatctccgggcgaacgcgcgacgttatcttgccgcgcctctcagtctgtgtctagctcttatctggcctggtaccagcaaaaaccaggtcaggcgccgcgcctgttaatctacggcgcctcttctcgcgcgaccggcatcccggcgcgtttcagcggcagcggttctggcaccgatttcacgctgaccatctctcgcctggagccagaagactttgccgtgtattactgccaaacgtacgataatggcttacgcggttctattttcggccagggcacgaaggttgaaatcaaa

SEQ ID NO: 1094 - DNA, 759 bp, synthetic construct
  source 1..759: mol_type = other DNA
caggtgcagttagttgaaagcggcggtggtgtggtgcaaccgggtcgtagcttacgtttatcttgcgcggcctctggctttacctttagcagctatgcgatgcattgggtgcgtcaggcgccaggtaagggcttagagtgggtggcggttatctcttatgacggtagcaacaagtactacgccgatagcgttaaaggccgcttcacgattagccgcgacaacagcaaaaataccttatacttacagatgaattctttacgcgccgaggatacggccgtttattattgtgcccgtggtacgaactcttaccgccgcctggtgtacgacgcgttcgatatttggggccaatggggtcaaggcaccctggtgacggtttcttctggtggctcttctcgtagcagctctagcggcggtggcggcagcggtggcggcggtgaaattgtgctgacccagagcccggccacgctgtctttaagcccgggcgagcgtgccacgttaagctgtcgcgccagccaaagcgttagctctagctatttagcctggtatcaacagaagccaggccaggcgccacgtttattaatctatggtgcctcttctcgtgcgaccggtattccggcgcgctttagcggctctggtagcggcaccgacttcaccctgacgatctctcgtttagagccggaggatttcgcggtgtactattgtaactcttatgcgggctctggttacgtttttggtcagggcaccaaggttgagattaaa

SEQ ID NO: 1095 - DNA, 762 bp, synthetic construct
  source 1..762: mol_type = other DNA
caggtgcagttagttgaaagcggcggtggtgtggtgcaaccgggtcgtagcttacgtttatcttgcgcggcctctggctttacctttagcagctatgcgatgcattgggtgcgtcaggcgccaggtaagggcttagagtgggtggcggttatctcttatgacggtagcaacaagtactacgccgatagcgttaaaggccgcttcacgattagccgcgacaacagcaaaaataccttatacttacagatgaattctttacgcgccgaggatacggccgtttattattgtgcccgtggtacgaactcttaccgccgcctggtgtacgacgcgttcgatatttggggccaatggggtcaaggcaccctggtgacggtttcttctggtggctcttctcgtagcagctctagcggcggtggcggcagcggtggcggcggtgaaattgtgctgacccagagcccggccacgctgtctttaagcccgggcgagcgtgccacgttaagctgtcgcgccagccaaagcgttagctctagctatttagcctggtatcaacagaagccaggccaggcgccacgtttattaatctatggtgcctcttctcgtgcgaccggtattccggcgcgctttagcggctctggtagcggcaccgacttcaccctgacgatctctcgtttagagccggaggatttcgcggtgtactattgtcaagcctgggatagcagcacgggttacgtttttggtcagggcaccaaggttgagattaaa

SEQ ID NO: 1096 - DNA, 756 bp, synthetic construct
  source 1..756: mol_type = other DNA
caggtgcagttagttgaaagcggcggtggtgtggtgcaaccgggtcgtagcttacgtttatcttgcgcggcctctggctttacctttagcagctatgcgatgcattgggtgcgtcaggcgccaggtaagggcttagagtgggtggcggttatctcttatgacggtagcaacaagtactacgccgatagcgttaaaggccgcttcacgattagccgcgacaacagcaaaaataccttatacttacagatgaattctttacgcgccgaggatacggccgtttattattgtgcccgtggtacgaactcttaccgccgcctggtgtacgacgcgttcgatatttggggccaatggggtcaaggcaccctggtgacggtttcttctggtggctcttctcgtagcagctctagcggcggtggcggcagcggtggcggcggtgaaattgtgctgacccagagcccggccacgctgtctttaagcccgggcgagcgtgccacgttaagctgtcgcgccagccaaagcgttagctctagctatttagcctggtatcaacagaagccaggccaggcgccacgtttattaatctatggtgcctcttctcgtgcgaccggtattccggcgcgctttagcggctctggtagcggcaccgacttcaccctgacgatctctcgtttagagccggaggatttcgcggtgtactattgtcaacaatatcataatacgccaacgttcggccaaggcaccaaagttgagatcaaa

SEQ ID NO: 1097 - DNA, 759 bp, synthetic construct
  source 1..759: mol_type = other DNA
caggtgcagttagttgaaagcggcggtggtgtggtgcaaccgggtcgtagcttacgtttatcttgcgcggcctctggctttacctttagcagctatgcgatgcattgggtgcgtcaggcgccaggtaagggcttagagtgggtggcggttatctcttatgacggtagcaacaagtactacgccgatagcgttaaaggccgcttcacgattagccgcgacaacagcaaaaataccttatacttacagatgaattctttacgcgccgaggatacggccgtttattattgtgcccgtggtacgaactcttaccgccgcctggtgtacgacgcgttcgatatttggggccaatggggtcaaggcaccctggtgacggtttcttctggtggctcttctcgtagcagctctagcggcggtggcggcagcggtggcggcggtgaaattgtgctgacccagagcccggccacgctgtctttaagcccgggcgagcgtgccacgttaagctgtcgcgccagccaaagcgttagctctagctatttagcctggtatcaacagaagccaggccaggcgccacgtttattaatctatggtgcctcttctcgtgcgaccggtattccggcgcgctttagcggctctggtagcggcaccgacttcaccctgacgatctctcgtttagagccggaggatttcgcggtgtactattgtcaacaatataatagcttcccaccaacgtttggtcagggcaccaaggttgagattaaa

SEQ ID NO: 1098 - DNA, 768 bp, synthetic construct
  source 1..768: mol_type = other DNA
caggtgcagttagttgaaagcggcggtggtgtggtgcaaccgggtcgtagcttacgtttatcttgcgcggcctctggctttacctttagcagctatgcgatgcattgggtgcgtcaggcgccaggtaagggcttagagtgggtggcggttatctcttatgacggtagcaacaagtactacgccgatagcgttaaaggccgcttcacgattagccgcgacaacagcaaaaataccttatacttacagatgaattctttacgcgccgaggatacggccgtttattattgtgcccgtggtacgaactcttaccgccgcctggtgtacgacgcgttcgatatttggggccaatggggtcaaggcaccctggtgacggtttcttctggtggctcttctcgtagcagctctagcggcggtggcggcagcggtggcggcggtgaaattgtgctgacccagagcccggccacgctgtctttaagcccgggcgagcgtgccacgttaagctgtcgcgccagccaaagcgttagctctagctatttagcctggtatcaacagaagccaggccaggcgccacgtttattaatctatggtgcctcttctcgtgcgaccggtattccggcgcgctttagcggctctggtagcggcaccgacttcaccctgacgatctctcgtttagagccggaggatttcgcggtgtactattgtcaagtttgggatagcggctctacgcgcttaggcgtttttggccagggtacgaaggtggagatcaaa

SEQ ID NO: 1099 - DNA, 747 bp, synthetic construct
  source 1..747: mol_type = other DNA
caggtgcagttagttgaaagcggcggtggtgtggtgcaaccgggtcgtagcttacgtttatcttgcgcggcctctggctttacctttagcagctatgcgatgcattgggtgcgtcaggcgccaggtaagggcttagagtgggtggcggttatctcttatgacggtagcaacaagtactacgccgatagcgttaaaggccgcttcacgattagccgcgacaacagcaaaaataccttatacttacagatgaattctttacgcgccgaggatacggccgtttattattgtgcccgtcaccacccatctgccgccggtgcgtttgacatctggggccaatggggccagggcacgttagttaccgtgagcagcggtggttcttctcgcagctcttctagcggcggcggtggcagcggtggcggcggcgagattgtgttaacccagagcccggcgaccctgagcttatctccgggtgagcgtgcgaccttaagctgtcgcgccagccaatctgttagctctagctacctggcctggtatcagcaaaagccgggtcaggccccacgtctgctgatctatggtgcctctagccgcgccacgggtattccggcgcgctttagcggctctggcagcggcacggactttaccctgacgatcagccgtttagagccagaagacttcgcggtttattactgccagcaaaattactctacgccgtggacctttggtcaaggtacgaaagttgaaattaaa

SEQ ID NO: 1100 - DNA, 753 bp, synthetic construct
  source 1..753: mol_type = other DNA
caggtgcagttagttgaaagcggcggtggtgtggtgcaaccgggtcgtagcttacgtttatcttgcgcggcctctggctttacctttagcagctatgcgatgcattgggtgcgtcaggcgccaggtaagggcttagagtgggtggcggttatctcttatgacggtagcaacaagtactacgccgatagcgttaaaggccgcttcacgattagccgcgacaacagcaaaaataccttatacttacagatgaattctttacgcgccgaggatacggccgtttattattgtgcccgtcacccattataccgcaacgccgcggatgactactggggccaatggggccagggcacgttagttaccgtgagcagcggtggttcttctcgcagctcttctagcggcggcggtggcagcggtggcggcggcgagattgtgttaacccagagcccggcgaccctgagcttatctccgggtgagcgtgcgaccttaagctgtcgcgccagccaatctgttagctctagctacctggcctggtatcagcaaaagccgggtcaggccccacgtctgctgatctatggtgcctctagccgcgccacgggtattccggcgcgctttagcggctctggcagcggcacggactttaccctgacgatcagccgtttagagccagaagacttcgcggtttattactgccaggtttgggattactctcgcaataattgggtgttcggtcaaggtaccaaggtggaaattaaa

SEQ ID NO: 1101 - DNA, 753 bp, synthetic construct
  source 1..753: mol_type = other DNA
caggtgcagttagttgaaagcggcggtggtgtggtgcaaccgggtcgtagcttacgtttatcttgcgcggcctctggctttacctttagcagctatgcgatgcattgggtgcgtcaggcgccaggtaagggcttagagtgggtggcggttatctcttatgacggtagcaacaagtactacgccgatagcgttaaaggccgcttcacgattagccgcgacaacagcaaaaataccttatacttacagatgaattctttacgcgccgaggatacggccgtttattattgtgcccgtcaccgcggtccagccgccggtcgttttgacccatggggccaatggggccagggcacgttagttaccgtgagcagcggtggttcttctcgcagctcttctagcggcggcggtggcagcggtggcggcggcgagattgtgttaacccagagcccggcgaccctgagcttatctccgggtgagcgtgcgaccttaagctgtcgcgccagccaatctgttagctctagctacctggcctggtatcagcaaaagccgggtcaggccccacgtctgctgatctatggtgcctctagccgcgccacgggtattccggcgcgctttagcggctctggcagcggcacggactttaccctgacgatcagccgtttagagccagaagacttcgcggtttattactgcgaaacgtgggatggttctttaagcaccgtggttttcggtcaaggcacgaaagtggaaatcaaa

SEQ ID NO: 1102 - DNA, 747 bp, synthetic construct
  source 1..747: mol_type = other DNA
caggtgcagttagttgaaagcggcggtggtgtggtgcaaccgggtcgtagcttacgtttatcttgcgcggcctctggctttacctttagcagctatgcgatgcattgggtgcgtcaggcgccaggtaagggcttagagtgggtggcggttatctcttatgacggtagcaacaagtactacgccgatagcgttaaaggccgcttcacgattagccgcgacaacagcaaaaataccttatacttacagatgaattctttacgcgccgaggatacggccgtttattattgtgcccgtcaccgcggtccagccgccggtcgttttgacccatggggccaatggggccagggcacgttagttaccgtgagcagcggtggttcttctcgcagctcttctagcggcggcggtggcagcggtggcggcggcgagattgtgttaacccagagcccggcgaccctgagcttatctccgggtgagcgtgcgaccttaagctgtcgcgccagccaatctgttagctctagctacctggcctggtatcagcaaaagccgggtcaggccccacgtctgctgatctatggtgcctctagccgcgccacgggtattccggcgcgctttagcggctctggcagcggcacggactttaccctgacgatcagccgtttagagccagaagacttcgcggtttattactgccaggcctgggatggttcttctgtggtgtttggtcaaggtacgaaagttgaaattaaa

SEQ ID NO: 1103 - DNA, 747 bp, synthetic construct
  source 1..747: mol_type = other DNA
caggtgcagttagttgaaagcggcggtggtgtggtgcaaccgggtcgtagcttacgtttatcttgcgcggcctctggctttacctttagcagctatgcgatgcattgggtgcgtcaggcgccaggtaagggcttagagtgggtggcggttatctcttatgacggtagcaacaagtactacgccgatagcgttaaaggccgcttcacgattagccgcgacaacagcaaaaataccttatacttacagatgaattctttacgcgccgaggatacggccgtttattattgtgcccgtcaccgcggtccagccgccggtcgttttgacccatggggccaatggggccagggcacgttagttaccgtgagcagcggtggttcttctcgcagctcttctagcggcggcggtggcagcggtggcggcggcgagattgtgttaacccagagcccggcgaccctgagcttatctccgggtgagcgtgcgaccttaagctgtcgcgccagccaatctgttagctctagctacctggcctggtatcagcaaaagccgggtcaggccccacgtctgctgatctatggtgcctctagccgcgccacgggtattccggcgcgctttagcggctctggcagcggcacggactttaccctgacgatcagccgtttagagccagaagacttcgcggtttattactgccagcaatatggttcttctacctataccttcggtcaaggtaccaaggtggaaattaaa

SEQ ID NO: 1104 - DNA, 756 bp, synthetic construct
  source 1..756: mol_type = other DNA
caggtgcagttagttgaaagcggcggtggtgtggtgcaaccgggtcgtagcttacgtttatcttgcgcggcctctggctttacctttagcagctatgcgatgcattgggtgcgtcaggcgccaggtaagggcttagagtgggtggcggttatctcttatgacggtagcaacaagtactacgccgatagcgttaaaggccgcttcacgattagccgcgacaacagcaaaaataccttatacttacagatgaattctttacgcgccgaggatacggccgtttattattgtgcccgtatcccaaaccgctctcacggtggctggtttgacccatggggccaatggggccagggcacgttagttaccgtgagcagcggtggttcttctcgcagctcttctagcggcggcggtggcagcggtggcggcggcgagattgtgttaacccagagcccggcgaccctgagcttatctccgggtgagcgtgcgaccttaagctgtcgcgccagccaatctgttagctctagctacctggcctggtatcagcaaaagccgggtcaggccccacgtctgctgatctatggtgcctctagccgcgccacgggtattccggcgcgctttagcggctctggcagcggcacggactttaccctgacgatcagccgtttagagccagaagacttcgcggtttattactgcggcacgtgggattcttctttaagcgcgaatgttttcggtcaaggcacgaaagtggaaatcaaa

SEQ ID NO: 1105 - DNA, 777 bp, synthetic construct
  source 1..777: mol_type = other DNA
caggtgcagttagttgaaagcggcggtggtgtggtgcaaccgggtcgtagcttacgtttatcttgcgcggcctctggctttacctttagcagctatgcgatgcattgggtgcgtcaggcgccaggtaagggcttagagtgggtggcggttatctcttatgacggtagcaacaagtactacgccgatagcgttaaaggccgcttcacgattagccgcgacaacagcaaaaataccttatacttacagatgaattctttacgcgccgaggatacggccgtttattattgtgcccgtaaggagtaccgcacgttcgacagcccgtacacgctgtaccgtagcagcgcctacttcgattattggggccagtggggtcaaggtacgttagtgacggttagcagcggcggtagcagccgcagcagcagctctggcggcggtggcagcggcggcggcggcgaaattgttttaacccaatctccggcgaccttaagcttatctccaggcgagcgcgccaccttaagctgtcgtgccagccagtctgttagctctagctacttagcgtggtatcagcaaaaaccaggtcaagcgccacgcttattaatttatggcgccagcagccgtgccaccggcattccagcccgttttagcggttctggcagcggtacggactttacgttaaccatcagccgcctggaaccagaagacttcgccgtgtattattgtcaatctgccgattctagcggcccggttttcggtcagggtacgaaagttgaaattaaa

SEQ ID NO: 1106 - DNA, 741 bp, synthetic construct
  source 1..741: mol_type = other DNA
caggtgcagttagttgaaagcggcggtggtgtggtgcaaccgggtcgtagcttacgtttatcttgcgcggcctctggctttacctttagcagctatgcgatgcattgggtgcgtcaggcgccaggtaagggcttagagtgggtggcggttatctcttatgacggtagcaacaagtactacgccgatagcgttaaaggccgcttcacgattagccgcgacaacagcaaaaataccttatacttacagatgaattctttacgcgccgaggatacggccgtttattattgtgcccgtaagcgcccacgcccaccatactggggccagtggggtcaaggcacgctggtgaccgtttcttctggcggcagcagccgctcttcttcttctggcggtggtggcagcggcggtggcggcgagattgtgctgacgcagagcccagcgaccctgagcctgagcccgggcgagcgcgcgacgttaagctgccgtgccagccaatctgttagctcttcttacctggcctggtatcaacagaagccgggccaagccccgcgcctgttaatctatggcgcgtctagccgcgccacgggcatcccagcccgctttagcggctctggcagcggcacggattttaccttaacgattagccgtttagagccggaagacttcgccgtgtactactgccaagtgtgggacagcagctctgatcaccaagtttttggccagggtacgaaggttgaaatcaaa

SEQ ID NO: 1107 - DNA, 741 bp, synthetic construct
  source 1..741: mol_type = other DNA
caggtgcagttagttgaaagcggcggtggtgtggtgcaaccgggtcgtagcttacgtttatcttgcgcggcctctggctttacctttagcagctatgcgatgcattgggtgcgtcaggcgccaggtaagggcttagagtgggtggcggttatctcttatgacggtagcaacaagtactacgccgatagcgttaaaggccgcttcacgattagccgcgacaacagcaaaaataccttatacttacagatgaattctttacgcgccgaggatacggccgtttattattgtgcccgtttaggtccacactacggtatggacgtgtggggccaatggggtcagggtaccctggtgacggtttctagcggcggcagctctcgctcttcttctagcggtggtggcggcagcggtggcggcggtgaaattgtgttaacccagtctccggcgaccctgagcctgagcccgggtgagcgtgccacgctgagctgccgcgcgtctcaatctgtgtcttcttcttatttagcgtggtaccagcaaaaaccgggtcaagcgccacgtttattaatttatggcgccagctctcgcgccaccggtatcccagcccgttttagcggtagcggcagcggtaccgattttacgttaaccattagccgcttagaaccggaggacttcgcggtttactattgtcagacgtggggcaccggtgatgttgttttcggccagggcacgaaggttgagattaaa

SEQ ID NO: 1108 - DNA, 753 bp, synthetic construct
  source 1..753: mol_type = other DNA
caggtgcagttagttgaaagcggcggtggtgtggtgcaaccgggtcgtagcttacgtttatcttgcgcggcctctggctttacctttagcagctatgcgatgcattgggtgcgtcaggcgccaggtaagggcttagagtgggtggcggttatctcttatgacggtagcaacaagtactacgccgatagcgttaaaggccgcttcacgattagccgcgacaacagcaaaaataccttatacttacagatgaattctttacgcgccgaggatacggccgtttattattgtgcccgtttacacttacgcggttctatcggcctgccaccagattactggggccagtggggccaaggtacgctggtgaccgtgtcttctggtggttctagccgctctagcagcagcggtggcggcggtagcggcggcggtggcgaaatcgtgctgacccagagcccggcgaccttatctctgtctccaggcgaacgtgccaccttatcttgtcgtgcctctcaaagcgttagctctagctacctggcgtggtaccaacagaagccgggtcaagcgccgcgtttactgatctacggtgcgtcttctcgcgccaccggcattccagcgcgtttttctggcagcggctctggtaccgattttacgttaaccatttctcgcttagaaccagaggatttcgcggtttattattgtcagcaatacaagcgtaatccgcgcacgttcggtcagggtaccaaagtggagatcaaa

SEQ ID NO: 1109 - DNA, 759 bp, synthetic construct
  source 1..759: mol_type = other DNA
caggtgcagttagttgaaagcggcggtggtgtggtgcaaccgggtcgtagcttacgtttatcttgcgcggcctctggctttacctttagcagctatgcgatgcattgggtgcgtcaggcgccaggtaagggcttagagtgggtggcggttatctcttatgacggtagcaacaagtactacgccgatagcgttaaaggccgcttcacgattagccgcgacaacagcaaaaataccttatacttacagatgaattctttacgcgccgaggatacggccgtttattattgtgcccgtaacgccgttgccggtacgtggttaagcagcttcgactattggggtcagtggggccagggtacgttagtgaccgtgagctctggtggttcttctcgttcttctagcagcggcggtggcggctctggcggcggcggtgaaattgttctgacccagagcccggcgaccctgtctttaagcccaggtgaacgtgcgacgctgtcttgtcgcgcgtctcaatctgtgtctagctcttatttagcgtggtatcaacaaaaaccaggccaagccccgcgtctgttaatttacggtgccagctctcgcgccacgggcattccggcccgttttagcggtagcggcagcggtacggattttaccttaacgattagccgcttagagccggaggactttgccgtgtactattgccaagtgttagactctagcagcgatgacgttgttttcggccaaggcaccaaagttgagatcaaa

SEQ ID NO: 1110 - DNA, 747 bp, synthetic construct
  source 1..747: mol_type = other DNA
caggtgcagttagttgaaagcggcggtggtgtggtgcaaccgggtcgtagcttacgtttatcttgcgcggcctctggctttacctttagcagctatgcgatgcattgggtgcgtcaggcgccaggtaagggcttagagtgggtggcggttatctcttatgacggtagcaacaagtactacgccgatagcgttaaaggccgcttcacgattagccgcgacaacagcaaaaataccttatacttacagatgaattctttacgcgccgaggatacggccgtttattattgtgcccgtcaatactcttctggttggccatggttcgatccgtggggtcaatggggccaaggcaccctggttacggttagcagcggcggctcttctcgctcttctagctctggtggcggcggctctggcggcggtggcgaaattgttctgacccaaagcccggcgaccctgagcctgagcccaggtgaacgcgccaccctgagctgtcgtgcctctcaaagcgtttcttctagctacctggcctggtatcaacagaaaccaggtcaggccccgcgcttactgatttatggtgcgtcttctcgcgcgacgggtatcccagcgcgtttttctggcagcggctctggcaccgatttcacgctgaccatttctcgcctggaaccagaggactttgccgtttattactgccaacagtatggtagctctccattcacctttggccaaggtacgaaggtggagattaaa

SEQ ID NO: 1111 - DNA, 744 bp, synthetic construct
  source 1..744: mol_type = other DNA
caggtgcagttagttgaaagcggcggtggtgtggtgcaaccgggtcgtagcttacgtttatcttgcgcggcctctggctttacctttagcagctatgcgatgcattgggtgcgtcaggcgccaggtaagggcttagagtgggtggcggttatctcttatgacggtagcaacaagtactacgccgatagcgttaaaggccgcttcacgattagccgcgacaacagcaaaaataccttatacttacagatgaattctttacgcgccgaggatacggccgtttattattgtgcccgtcgcgacccaggtacgtggcaattcgatccgtggggtcaatggggccaaggcaccctggttacggttagcagcggcggctcttctcgctcttctagctctggtggcggcggctctggcggcggtggcgaaattgttctgacccaaagcccggcgaccctgagcctgagcccaggtgaacgcgccaccctgagctgtcgtgcctctcaaagcgtttcttctagctacctggcctggtatcaacagaaaccaggtcaggccccgcgcttactgatttatggtgcgtcttctcgcgcgacgggtatcccagcgcgtttttctggcagcggctctggcaccgatttcacgctgaccatttctcgcctggaaccagaggactttgccgtttattactgcatgcaagcgcgtcaaaccccagttacgtttggccagggtacgaaggttgaaatcaaa

SEQ ID NO: 1112 - DNA, 747 bp, synthetic construct
  source 1..747: mol_type = other DNA
caggtgcagttagttgaaagcggcggtggtgtggtgcaaccgggtcgtagcttacgtttatcttgcgcggcctctggctttacctttagcagctatgcgatgcattgggtgcgtcaggcgccaggtaagggcttagagtgggtggcggttatctcttatgacggtagcaacaagtactacgccgatagcgttaaaggccgcttcacgattagccgcgacaacagcaaaaataccttatacttacagatgaattctttacgcgccgaggatacggccgtttattattgtgcccgtcgcgactctggtaacatgtacggttattggggccaatggggtcagggtaccctggtgacggtttctagcggcggcagctctcgctcttcttctagcggtggtggcggcagcggtggcggcggtgaaattgtgttaacccagtctccggcgaccctgagcctgagcccgggtgagcgtgccacgctgagctgccgcgcgtctcaatctgtgtcttcttcttatttagcgtggtaccagcaaaaaccgggtcaagcgccacgtttattaatttatggcgccagctctcgcgccaccggtatcccagcccgttttagcggtagcggcagcggtaccgattttacgttaaccattagccgcttagaaccggaggacttcgcggtttactattgtgcggcctgggatagccgcagccgcttatacatgtttggccagggtacgaaggttgaaatcaaa

SEQ ID NO: 1113 - DNA, 756 bp, synthetic construct
  source 1..756: mol_type = other DNA
caggtgcagttagttgaaagcggcggtggtgtggtgcaaccgggtcgtagcttacgtttatcttgcgcggcctctggctttacctttagcagctatgcgatgcattgggtgcgtcaggcgccaggtaagggcttagagtgggtggcggttatctcttatgacggtagcaacaagtactacgccgatagcgttaaaggccgcttcacgattagccgcgacaacagcaaaaataccttatacttacagatgaattctttacgcgccgaggatacggccgtttattattgtgcccgtcgcatccgcgccaactctcgctatagcccagacccgtggggtcagtggggccagggtacgttagtgaccgtgagctctggtggttcttctcgttcttctagcagcggcggtggcggctctggcggcggcggtgaaattgttctgacccagagcccggcgaccctgtctttaagcccaggtgaacgtgcgacgctgtcttgtcgcgcgtctcaatctgtgtctagctcttatttagcgtggtatcaacaaaaaccaggccaagccccgcgtctgttaatttacggtgccagctctcgcgccacgggcattccggcccgttttagcggtagcggcagcggtacggattttaccttaacgattagccgcttagagccggaggactttgccgtgtactattgcggtacctgggactctcgcctgagcaccggtatgttcggtcaaggcacgaaagtggaaatcaaa

SEQ ID NO: 1114 - DNA, 750 bp, synthetic construct
  source 1..750: mol_type = other DNA
caggtgcagttagttgaaagcggcggtggtgtggtgcaaccgggtcgtagcttacgtttatcttgcgcggcctctggctttacctttagcagctatgcgatgcattgggtgcgtcaggcgccaggtaagggcttagagtgggtggcggttatctcttatgacggtagcaacaagtactacgccgatagcgttaaaggccgcttcacgattagccgcgacaacagcaaaaataccttatacttacagatgaattctttacgcgccgaggatacggccgtttattattgtgcccgtcgcatccgcgccaactctcgctatagcccagacccgtggggtcagtggggccagggtacgttagtgaccgtgagctctggtggttcttctcgttcttctagcagcggcggtggcggctctggcggcggcggtgaaattgttctgacccagagcccggcgaccctgtctttaagcccaggtgaacgtgcgacgctgtcttgtcgcgcgtctcaatctgtgtctagctcttatttagcgtggtatcaacaaaaaccaggccaagccccgcgtctgttaatttacggtgccagctctcgcgccacgggcattccggcccgttttagcggtagcggcagcggtacggattttaccttaacgattagccgcttagagccggaggactttgccgtgtactattgccaacagtactacgacccgccgtggaccttcggtcaaggtaccaaggtggaaattaaa

SEQ ID NO: 1115 - DNA, 753 bp, synthetic construct
  source 1..753: mol_type = other DNA
caggtgcagttagttgaaagcggcggtggtgtggtgcaaccgggtcgtagcttacgtttatcttgcgcggcctctggctttacctttagcagctatgcgatgcattgggtgcgtcaggcgccaggtaagggcttagagtgggtggcggttatctcttatgacggtagcaacaagtactacgccgatagcgttaaaggccgcttcacgattagccgcgacaacagcaaaaataccttatacttacagatgaattctttacgcgccgaggatacggccgtttattattgtgcccgtcgcttacgcggtcgcgccatggagaccgattactggggtcagtggggtcagggcaccttagttacggtgagcagcggcggttcttctcgctctagctcttctggcggcggcggtagcggcggtggcggcgaaatcgtgctgacgcagagcccggcgaccctgagcctgtctccaggcgagcgcgcgaccctgtcttgccgcgcctctcagtctgtttctagctcttatttagcgtggtaccagcagaagccaggccaagcgccacgcctgctgatttacggcgcctcttctcgtgccacgggtatcccggcgcgtttcagcggcagcggtagcggcaccgacttcaccctgaccatctctcgtctggagccagaggatttcgccgtgtactattgtcaggtgtgggacagccgccacgaccattgggtgtttggtcaaggtacgaaagttgaaattaaa

SEQ ID NO: 1116 - DNA, 771 bp, synthetic construct
  source 1..771: mol_type = other DNA
caggtgcagttagttgaaagcggcggtggtgtggtgcaaccgggtcgtagcttacgtttatcttgcgcggcctctggctttacctttagcagctatgcgatgcattgggtgcgtcaggcgccaggtaagggcttagagtgggtggcggttatctcttatgacggtagcaacaagtactacgccgatagcgttaaaggccgcttcacgattagccgcgacaacagcaaaaataccttatacttacagatgaattctttacgcgccgaggatacggccgtttattattgtgcccgtcgctctggttctggttggttacactattataaggactattacatggatgtgtggggccaatggggtcaaggcaccctggtgacggtttcttctggtggctcttctcgtagcagctctagcggcggtggcggcagcggtggcggcggtgaaattgtgctgacccagagcccggccacgctgtctttaagcccgggcgagcgtgccacgttaagctgtcgcgccagccaaagcgttagctctagctatttagcctggtatcaacagaagccaggccaggcgccacgtttattaatctatggtgcctcttctcgtgcgaccggtattccggcgcgctttagcggctctggtagcggcaccgacttcaccctgacgatctctcgtttagagccggaggatttcgcggtgtactattgtcaacaacgtagcaattggccacgcatgatcacgtttggtcagggcaccaaggttgagattaaa

SEQ ID NO: 1117 - DNA, 780 bp, synthetic construct
  source 1..780: mol_type = other DNA
caggtgcagttagttgaaagcggcggtggtgtggtgcaaccgggtcgtagcttacgtttatcttgcgcggcctctggctttacctttagcagctatgcgatgcattgggtgcgtcaggcgccaggtaagggcttagagtgggtggcggttatctcttatgacggtagcaacaagtactacgccgatagcgttaaaggccgcttcacgattagccgcgacaacagcaaaaataccttatacttacagatgaattctttacgcgccgaggatacggccgtttattattgtgcccgttctcgcgccggttaccgcgttgattatttagcctggagcggtctgtttgattactggggtcaatggggccagggcaccttagttacggtttctagcggtggtagcagccgttctagcagctctggcggcggcggtagcggcggtggcggcgaaattgtgctgacccagtctccagcgacgttaagcctgagcccaggcgagcgcgccaccttatcttgtcgtgccagccaaagcgttagcagctcttacctggcctggtatcaacaaaaaccgggccaagcgccacgcttactgatctacggtgccagcagccgtgccaccggcattccagcgcgtttttctggtagcggcagcggtacggattttacgttaacgatttctcgcctggagccggaggattttgccgtgtactactgtagcacctatgacaactctcaacgtaacggcggcagcgttttcggtcagggtacgaaagttgaaattaaa

SEQ ID NO: 1118 - DNA, 774 bp, synthetic construct
  source 1..774: mol_type = other DNA
caggtgcagttagttgaaagcggcggtggtgtggtgcaaccgggtcgtagcttacgtttatcttgcgcggcctctggctttacctttagcagctatgcgatgcattgggtgcgtcaggcgccaggtaagggcttagagtgggtggcggttatctcttatgacggtagcaacaagtactacgccgatagcgttaaaggccgcttcacgattagccgcgacaacagcaaaaataccttatacttacagatgaattctttacgcgccgaggatacggccgtttattattgtgcccgttcttacgtttaccgcatcggtacctggagctacgacgtgtacctgggcgatgtttggggtcaatggggccagggcaccttagttacggtttctagcggtggtagcagccgttctagcagctctggcggcggcggtagcggcggtggcggcgaaattgtgctgacccagtctccagcgacgttaagcctgagcccaggcgagcgcgccaccttatcttgtcgtgccagccaaagcgttagcagctcttacctggcctggtatcaacaaaaaccgggccaagcgccacgcttactgatctacggtgccagcagccgtgccaccggcattccagcgcgtttttctggtagcggcagcggtacggattttacgttaacgatttctcgcctggagccggaggattttgccgtgtactactgtcaggtgtgggattcttcttctgaccattacgtgtttggccaaggtacgaaagttgagattaaa

SEQ ID NO: 1119 - DNA, 744 bp, synthetic construct
  source 1..744: mol_type = other DNA
caggtgcagttagttgaaagcggcggtggtgtggtgcaaccgggtcgtagcttacgtttatcttgcgcggcctctggctttacctttagcagctatgcgatgcattgggtgcgtcaggcgccaggtaagggcttagagtgggtggcggttatctcttatgacggtagcaacaagtactacgccgatagcgttaaaggccgcttcacgattagccgcgacaacagcaaaaataccttatacttacagatgaattctttacgcgccgaggatacggccgtttattattgtgcccgtacgatgcgcggtcaattaggttactggggccagtggggtcaaggcacgctggtgaccgtttcttctggcggcagcagccgctcttcttcttctggcggtggtggcagcggcggtggcggcgagattgtgctgacgcagagcccagcgaccctgagcctgagcccgggcgagcgcgcgacgttaagctgccgtgccagccaatctgttagctcttcttacctggcctggtatcaacagaagccgggccaagccccgcgcctgttaatctatggcgcgtctagccgcgccacgggcatcccagcccgctttagcggctctggcagcggcacggattttaccttaacgattagccgtttagagccggaagacttcgccgtgtactactgccaacagcgcagcaattggccaggcccattcacgtttggccagggtacgaaggttgaaatcaaa

SEQ ID NO: 1120 - DNA, 747 bp, synthetic construct
  source 1..747: mol_type = other DNA
caggtgcagttagttgaaagcggcggtggtgtggtgcaaccgggtcgtagcttacgtttatcttgcgcggcctctggctttacctttagcagctatgcgatgcattgggtgcgtcaggcgccaggtaagggcttagagtgggtggcggttatctcttatgacggtagcaacaagtactacgccgatagcgttaaaggccgcttcacgattagccgcgacaacagcaaaaataccttatacttacagatgaattctttacgcgccgaggatacggccgtttattattgtgcccgtacgcgctacccatactctatggacgtgtggggccaatggggtcagggtaccctggtgacggtttctagcggcggcagctctcgctcttcttctagcggtggtggcggcagcggtggcggcggtgaaattgtgttaacccagtctccggcgaccctgagcctgagcccgggtgagcgtgccacgctgagctgccgcgcgtctcaatctgtgtcttcttcttatttagcgtggtaccagcaaaaaccgggtcaagcgccacgtttattaatttatggcgccagctctcgcgccaccggtatcccagcccgttttagcggtagcggcagcggtaccgattttacgttaaccattagccgcttagaaccggaggacttcgcggtttactattgtagctcttatgattctagctctggtttcgtggtgtttggtcaaggtacgaaagttgaaattaaa

SEQ ID NO: 1121 - DNA, 756 bp, synthetic construct
  source 1..756: mol_type = other DNA
caggtgcagttagttgaaagcggcggtggtgtggtgcaaccgggtcgtagcttacgtttatcttgcgcggcctctggctttacctttagcagctatgcgatgcattgggtgcgtcaggcgccaggtaagggcttagagtgggtggcggttatctcttatgacggtagcaacaagtactacgccgatagcgttaaaggccgcttcacgattagccgcgacaacagcaaaaataccttatacttacagatgaattctttacgcgccgaggatacggccgtttattattgtgcccgtgttttatcttctcgctcttggggtagcggctacttcgattactggggccagtggggccaaggtacgctggtgaccgtgtcttctggtggttctagccgctctagcagcagcggtggcggcggtagcggcggcggtggcgaaatcgtgctgacccagagcccggcgaccttatctctgtctccaggcgaacgtgccaccttatcttgtcgtgcctctcaaagcgttagctctagctacctggcgtggtaccaacagaagccgggtcaagcgccgcgtttactgatctacggtgcgtcttctcgcgccaccggcattccagcgcgtttttctggcagcggctctggtaccgattttacgttaaccatttctcgcttagaaccagaggatttcgcggtttattattgtcagcacaagaacagctatccgttaatcttcggtcagggtaccaaagtggagatcaaa

SEQ ID NO: 1122 - DNA, 759 bp, synthetic construct
  source 1..759: mol_type = other DNA
caggtgcagttagttgaaagcggcggtggtgtggtgcaaccgggtcgtagcttacgtttatcttgcgcggcctctggctttacctttagcagctatgcgatgcattgggtgcgtcaggcgccaggtaagggcttagagtgggtggcggttatctcttatgacggtagcaacaagtactacgccgatagcgttaaaggccgcttcacgattagccgcgacaacagcaaaaataccttatacttacagatgaattctttacgcgccgaggatacggccgtttattattgtgcccgtgtttcttacggtggtttaggtagcctggacttctatttccagcattggggccaatggggtcaaggcaccctggtgacggtttcttctggtggctcttctcgtagcagctctagcggcggtggcggcagcggtggcggcggtgaaattgtgctgacccagagcccggccacgctgtctttaagcccgggcgagcgtgccacgttaagctgtcgcgccagccaaagcgttagctctagctatttagcctggtatcaacagaagccaggccaggcgccacgtttattaatctatggtgcctcttctcgtgcgaccggtattccggcgcgctttagcggctctggtagcggcaccgacttcaccctgacgatctctcgtttagagccggaggatttcgcggtgtactattgtcaagcctgggatagcagcggtgttgttttcggccaaggcaccaaagttgagatcaaa

SEQ ID NO: 1123 - DNA, 738 bp, synthetic construct
  source 1..738: mol_type = other DNA
caggtgcagttagttgaaagcggcggtggtgtggtgcaaccgggtcgtagcttacgtttatcttgcgcggcctctggctttacctttagcagctatgcgatgcattgggtgcgtcaggcgccaggtaagggcttagagtgggtggcggttatctcttatgacggtagcaacaagtactacgccgatagcgttaaaggccgcttcacgattagccgcgacaacagcaaaaataccttatacttacagatgaattctttacgcgccgaggatacggccgtttattattgtgcccgttacacgtggatcggtttcgacatctggggccagtggggtcaaggcacgctggtgaccgtttcttctggcggcagcagccgctcttcttcttctggcggtggtggcagcggcggtggcggcgagattgtgctgacgcagagcccagcgaccctgagcctgagcccgggcgagcgcgcgacgttaagctgccgtgccagccaatctgttagctcttcttacctggcctggtatcaacagaagccgggccaagccccgcgcctgttaatctatggcgcgtctagccgcgccacgggcatcccagcccgctttagcggctctggcagcggcacggattttaccttaacgattagccgtttagagccggaagacttcgccgtgtactactgccaacattactataccgttccgttcacgttcggccagggcacgaaggttgagattaaa

SEQ ID NO: 1124 - DNA, 753 bp, synthetic construct
  source 1..753: mol_type = other DNA
caggtgcagttagttgaaagcggcggtggtgtggtgcaaccgggtcgtagcttacgtttatcttgcgcggcctctggctttacctttagcagctatgcgatgcattgggtgcgtcaggcgccaggtaagggcttagagtgggtggcggttatctcttatgacggtagcaacaagtactacgccgatagcgttaaaggccgcttcacgattagccgcgacaacagcaaaaataccttatacttacagatgaattctttacgcgccgaggatacggccgtttattattgtgcccgttactacgacccaacgggttacctgaccgactactggggccaatggggccagggcacgttagttaccgtgagcagcggtggttcttctcgcagctcttctagcggcggcggtggcagcggtggcggcggcgagattgtgttaacccagagcccggcgaccctgagcttatctccgggtgagcgtgcgaccttaagctgtcgcgccagccaatctgttagctctagctacctggcctggtatcagcaaaagccgggtcaggccccacgtctgctgatctatggtgcctctagccgcgccacgggtattccggcgcgctttagcggctctggcagcggcacggactttaccctgacgatcagccgtttagagccagaagacttcgcggtttattactgcgcggcccgtgacgacaacctggatggctgggttttcggtcaaggcacgaaagtggaaatcaaa

SEQ ID NO: 1125 - DNA, 747 bp, synthetic construct
  source 1..747: mol_type = other DNA
caggtgcagttagttgaaagcggcggtggtgtggtgcaaccgggtcgtagcttacgtttatcttgcgcggcctctggctttacctttagcagctatgcgatgcattgggtgcgtcaggcgccaggtaagggcttagagtgggtggcggttatctcttatgacggtagcaacaagtactacgccgatagcgttaaaggccgcttcacgattagccgcgacaacagcaaaaataccttatacttacagatgaattctttacgcgccgaggatacggccgtttattattgtgcccgttactacgacccaacgggttacctgaccgactactggggccaatggggccagggcacgttagttaccgtgagcagcggtggttcttctcgcagctcttctagcggcggcggtggcagcggtggcggcggcgagattgtgttaacccagagcccggcgaccctgagcttatctccgggtgagcgtgcgaccttaagctgtcgcgccagccaatctgttagctctagctacctggcctggtatcagcaaaagccgggtcaggccccacgtctgctgatctatggtgcctctagccgcgccacgggtattccggcgcgctttagcggctctggcagcggcacggactttaccctgacgatcagccgtttagagccagaagacttcgcggtttattactgccagcaacattactctacgccgcgtaccttcggtcaaggtaccaaggtggaaattaaa

SEQ ID NO: 1126 - DNA, 759 bp, synthetic construct
  source 1..759: mol_type = other DNA
caggtgcagttagttgaaagcggcggtggtgtggtgcaaccgggtcgtagcttacgtttatcttgcgcggcctctggctttacctttagcagctatgcgatgcattgggtgcgtcaggcgccaggtaagggcttagagtgggtggcggttatctcttatgacggtagcaacaagtactacgccgatagcgttaaaggccgcttcacgattagccgcgacaacagcaaaaataccttatacttacagatgaattctttacgcgccgaggatacggccgtttattattgtgccagcgagggttaccgcacggaccgcaaatattggttagactattggggtcagtggggccagggtacgttagtgaccgtgagctctggtggttcttctcgttcttctagcagcggcggtggcggctctggcggcggcggtgaaattgttctgacccagagcccggcgaccctgtctttaagcccaggtgaacgtgcgacgctgtcttgtcgcgcgtctcaatctgtgtctagctcttatttagcgtggtatcaacaaaaaccaggccaagccccgcgtctgttaatttacggtgccagctctcgcgccacgggcattccggcccgttttagcggtagcggcagcggtacggattttaccttaacgattagccgcttagagccggaggactttgccgtgtactattgcggtacctgggactctggtagcagcgcgggtatcttcggtcagggtaccaaagtggagatcaaa

SEQ ID NO: 1127 - DNA, 753 bp, synthetic construct
  source 1..753: mol_type = other DNA
caggtgcagttagttgaaagcggcggtggtgtggtgcaaccgggtcgtagcttacgtttatcttgcgcggcctctggctttacctttagcagctatgcgatgcattgggtgcgtcaggcgccaggtaagggcttagagtgggtggcggttatctcttatgacggtagcaacaagtactacgccgatagcgttaaaggccgcttcacgattagccgcgacaacagcaaaaataccttatacttacagatgaattctttacgcgccgaggatacggccgtttattattgtgccagcgagggttaccgcacggaccgcaaatattggttagactattggggtcagtggggccagggtacgttagtgaccgtgagctctggtggttcttctcgttcttctagcagcggcggtggcggctctggcggcggcggtgaaattgttctgacccagagcccggcgaccctgtctttaagcccaggtgaacgtgcgacgctgtcttgtcgcgcgtctcaatctgtgtctagctcttatttagcgtggtatcaacaaaaaccaggccaagccccgcgtctgttaatttacggtgccagctctcgcgccacgggcattccggcccgttttagcggtagcggcagcggtacggattttaccttaacgattagccgcttagagccggaggactttgccgtgtactattgcatgcaaggcgccccacgcccgtttaccttcggtcaaggtaccaaggtggaaattaaa

SEQ ID NO: 1128 - DNA, 756 bp, synthetic construct
  source 1..756: mol_type = other DNA
caggtgcagttagttgaaagcggcggtggtgtggtgcaaccgggtcgtagcttacgtttatcttgcgcggcctctggctttacctttagcagctatgcgatgcattgggtgcgtcaggcgccaggtaagggcttagagtgggtggcggttatctcttatgacggtagcaacaagtactacgccgatagcgttaaaggccgcttcacgattagccgcgacaacagcaaaaataccttatacttacagatgaattctttacgcgccgaggatacggccgtttattattgtgccaccggtggttaccgcgactcttctggctatatggactactggggccaatggggccagggcacgttagttaccgtgagcagcggtggttcttctcgcagctcttctagcggcggcggtggcagcggtggcggcggcgagattgtgttaacccagagcccggcgaccctgagcttatctccgggtgagcgtgcgaccttaagctgtcgcgccagccaatctgttagctctagctacctggcctggtatcagcaaaagccgggtcaggccccacgtctgctgatctatggtgcctctagccgcgccacgggtattccggcgcgctttagcggctctggcagcggcacggactttaccctgacgatcagccgtttagagccagaagacttcgcggtttattactgccaggtttgggattcttcttctgatcatgtggttttcggtcaaggcacgaaagtggaaatcaaa

SEQ ID NO: 1129 - DNA, 765 bp, synthetic construct
  source 1..765: mol_type = other DNA
caggtgcagttagttgaaagcggcggtggtgtggtgcaaccgggtcgtagcttacgtttatcttgcgcggcctctggctttacctttagcagctatgcgatgcattgggtgcgtcaggcgccaggtaagggcttagagtgggtggcggttatctcttatgacggtagcaacaagtactacgccgatagcgttaaaggccgcttcacgattagccgcgacaacagcaaaaataccttatacttacagatgaattctttacgcgccgaggatacggccgtttattattgtgccaccggtggttaccgcggtgttttagcgggcgttgcctttgacatttggggccagtggggtcaaggtaccctggtgaccgtttcttctggtggtagctctcgcagcagcagctctggcggcggtggcagcggcggtggcggcgagattgtgctgacccagagcccggcgacgttaagcttatctccgggcgaacgcgcgacgttatcttgccgcgcctctcagtctgtgtctagctcttatctggcctggtaccagcaaaaaccaggtcaggcgccgcgcctgttaatctacggcgcctcttctcgcgcgaccggcatcccggcgcgtttcagcggcagcggttctggcaccgatttcacgctgaccatctctcgcctggagccagaagactttgccgtgtattactgcgccgcctgggacgatagcctgtctggtttctacgtgttcggccagggcacgaaggttgaaatcaaa

SEQ ID NO: 1130 - DNA, 759 bp, synthetic construct
  source 1..759: mol_type = other DNA
caggtgcagttagttgaaagcggcggtggtgtggtgcaaccgggtcgtagcttacgtttatcttgcgcggcctctggctttacctttagcagctatgcgatgcattgggtgcgtcaggcgccaggtaagggcttagagtgggtggcggttatctcttatgacggtagcaacaagtactacgccgatagcgttaaaggccgcttcacgattagccgcgacaacagcaaaaataccttatacttacagatgaattctttacgcgccgaggatacggccgtttattattgtgccaccggtggttaccgcggtgttttagcgggcgttgcctttgacatttggggccagtggggtcaaggtaccctggtgaccgtttcttctggtggtagctctcgcagcagcagctctggcggcggtggcagcggcggtggcggcgagattgtgctgacccagagcccggcgacgttaagcttatctccgggcgaacgcgcgacgttatcttgccgcgcctctcagtctgtgtctagctcttatctggcctggtaccagcaaaaaccaggtcaggcgccgcgcctgttaatctacggcgcctcttctcgcgcgaccggcatcccggcgcgtttcagcggcagcggttctggcaccgatttcacgctgaccatctctcgcctggagccagaagactttgccgtgtattactgcttattatcttatagcggcgcccgccacgtttttggtcagggcaccaaggttgagattaaa

SEQ ID NO: 1131 - DNA, 756 bp, synthetic construct
  source 1..756: mol_type = other DNA
caggtgcagttagttgaaagcggcggtggtgtggtgcaaccgggtcgtagcttacgtttatcttgcgcggcctctggctttacctttagcagctatgcgatgcattgggtgcgtcaggcgccaggtaagggcttagagtgggtggcggttatctcttatgacggtagcaacaagtactacgccgatagcgttaaaggccgcttcacgattagccgcgacaacagcaaaaataccttatacttacagatgaattctttacgcgccgaggatacggccgtttattattgtgccaccggtggttaccgcggtgttttagcgggcgttgcctttgacatttggggccagtggggtcaaggtaccctggtgaccgtttcttctggtggtagctctcgcagcagcagctctggcggcggtggcagcggcggtggcggcgagattgtgctgacccagagcccggcgacgttaagcttatctccgggcgaacgcgcgacgttatcttgccgcgcctctcagtctgtgtctagctcttatctggcctggtaccagcaaaaaccaggtcaggcgccgcgcctgttaatctacggcgcctcttctcgcgcgaccggcatcccggcgcgtttcagcggcagcggttctggcaccgatttcacgctgaccatctctcgcctggagccagaagactttgccgtgtattactgccaacaatacgaaaattatccattaacgttcggccaaggcaccaaagttgagatcaaa

SEQ ID NO: 1132 - DNA, 765 bp, synthetic construct
  source 1..765: mol_type = other DNA
caggtgcagttagttgaaagcggcggtggtgtggtgcaaccgggtcgtagcttacgtttatcttgcgcggcctctggctttacctttagcagctatgcgatgcattgggtgcgtcaggcgccaggtaagggcttagagtgggtggcggttatctcttatgacggtagcaacaagtactacgccgatagcgttaaaggccgcttcacgattagccgcgacaacagcaaaaataccttatacttacagatgaattctttacgcgccgaggatacggccgtttattattgtgccaccggtggttaccgcggtgttttagcgggcgttgcctttgacatttggggccagtggggtcaaggtaccctggtgaccgtttcttctggtggtagctctcgcagcagcagctctggcggcggtggcagcggcggtggcggcgagattgtgctgacccagagcccggcgacgttaagcttatctccgggcgaacgcgcgacgttatcttgccgcgcctctcagtctgtgtctagctcttatctggcctggtaccagcaaaaaccaggtcaggcgccgcgcctgttaatctacggcgcctcttctcgcgcgaccggcatcccggcgcgtttcagcggcagcggttctggcaccgatttcacgctgaccatctctcgcctggagccagaagactttgccgtgtattactgccaagtttgggacagcagcagctctcacttagttgtgttcggccagggcacgaaggttgaaatcaaa

SEQ ID NO: 1133 - DNA, 756 bp, synthetic construct
  source 1..756: mol_type = other DNA
caggtgcagttagttgaaagcggcggtggtgtggtgcaaccgggtcgtagcttacgtttatcttgcgcggcctctggctttacctttagcagctatgcgatgcattgggtgcgtcaggcgccaggtaagggcttagagtgggtggcggttatctcttatgacggtagcaacaagtactacgccgatagcgttaaaggccgcttcacgattagccgcgacaacagcaaaaataccttatacttacagatgaattctttacgcgccgaggatacggccgtttattattgtgccaccggtggttaccgcggtgttttagcgggcgttgcctttgacatttggggccagtggggtcaaggtaccctggtgaccgtttcttctggtggtagctctcgcagcagcagctctggcggcggtggcagcggcggtggcggcgagattgtgctgacccagagcccggcgacgttaagcttatctccgggcgaacgcgcgacgttatcttgccgcgcctctcagtctgtgtctagctcttatctggcctggtaccagcaaaaaccaggtcaggcgccgcgcctgttaatctacggcgcctcttctcgcgcgaccggcatcccggcgcgtttcagcggcagcggttctggcaccgatttcacgctgaccatctctcgcctggagccagaagactttgccgtgtattactgccaagtttgggacagcagcaccgccgttttcggtcagggtaccaaagtggagatcaaa

SEQ ID NO: 1134 - DNA, 756 bp, synthetic construct
  source 1..756: mol_type = other DNA
caggtgcagttagttgaaagcggcggtggtgtggtgcaaccgggtcgtagcttacgtttatcttgcgcggcctctggctttacctttagcagctatgcgatgcattgggtgcgtcaggcgccaggtaagggcttagagtgggtggcggttatctcttatgacggtagcaacaagtactacgccgatagcgttaaaggccgcttcacgattagccgcgacaacagcaaaaataccttatacttacagatgaattctttacgcgccgaggatacggccgtttattattgtgccaccggttcttaccgcaagtacgccggcggcttcgactattggggtcagtggggccagggtacgttagtgaccgtgagctctggtggttcttctcgttcttctagcagcggcggtggcggctctggcggcggcggtgaaattgttctgacccagagcccggcgaccctgtctttaagcccaggtgaacgtgcgacgctgtcttgtcgcgcgtctcaatctgtgtctagctcttatttagcgtggtatcaacaaaaaccaggccaagccccgcgtctgttaatttacggtgccagctctcgcgccacgggcattccggcccgttttagcggtagcggcagcggtacggattttaccttaacgattagccgcttagagccggaggactttgccgtgtactattgcaacagccgcgactctcgtggcgaacacgttatcttcggccaaggcaccaaagttgagatcaaa

SEQ ID NO: 1135 - DNA, 750 bp, synthetic construct
  source 1..750: mol_type = other DNA
caggtgcagttagttgaaagcggcggtggtgtggtgcaaccgggtcgtagcttacgtttatcttgcgcggcctctggctttacctttagcagctatgcgatgcattgggtgcgtcaggcgccaggtaagggcttagagtgggtggcggttatctcttatgacggtagcaacaagtactacgccgatagcgttaaaggccgcttcacgattagccgcgacaacagcaaaaataccttatacttacagatgaattctttacgcgccgaggatacggccgtttattattgtgccaccggttcttaccgcaagtacgccggcggcttcgactattggggtcagtggggccagggtacgttagtgaccgtgagctctggtggttcttctcgttcttctagcagcggcggtggcggctctggcggcggcggtgaaattgttctgacccagagcccggcgaccctgtctttaagcccaggtgaacgtgcgacgctgtcttgtcgcgcgtctcaatctgtgtctagctcttatttagcgtggtatcaacaaaaaccaggccaagccccgcgtctgttaatttacggtgccagctctcgcgccacgggcattccggcccgttttagcggtagcggcagcggtacggattttaccttaacgattagccgcttagagccggaggactttgccgtgtactattgccaacagtacgacgacctgccgattacgttcggtcaaggcacgaaagtggaaatcaaa

SEQ ID NO: 1136 - DNA, 750 bp, synthetic construct
  source 1..750: mol_type = other DNA
caggtgcagttagttgaaagcggcggtggtgtggtgcaaccgggtcgtagcttacgtttatcttgcgcggcctctggctttacctttagcagctatgcgatgcattgggtgcgtcaggcgccaggtaagggcttagagtgggtggcggttatctcttatgacggtagcaacaagtactacgccgatagcgttaaaggccgcttcacgattagccgcgacaacagcaaaaataccttatacttacagatgaattctttacgcgccgaggatacggccgtttattattgtgccaccggttcttaccgcaagtacgccggcggcttcgactattggggtcagtggggccagggtacgttagtgaccgtgagctctggtggttcttctcgttcttctagcagcggcggtggcggctctggcggcggcggtgaaattgttctgacccagagcccggcgaccctgtctttaagcccaggtgaacgtgcgacgctgtcttgtcgcgcgtctcaatctgtgtctagctcttatttagcgtggtatcaacaaaaaccaggccaagccccgcgtctgttaatttacggtgccagctctcgcgccacgggcattccggcccgttttagcggtagcggcagcggtacggattttaccttaacgattagccgcttagagccggaggactttgccgtgtactattgccaacagtacggttctagcccgaaaacgttcggtcaaggcacgaaagtggaaatcaaa

SEQ ID NO: 1137 - DNA, 732 bp, synthetic construct
  source 1..732: mol_type = other DNA
caggtgcagttagttgaaagcggcggtggtgtggtgcaaccgggtcgtagcttacgtttatcttgcgcggcctctggctttacctttagcagctatgcgatgcattgggtgcgtcaggcgccaggtaagggcttagagtgggtggcggttatctcttatgacggtagcaacaagtactacgccgatagcgttaaaggccgcttcacgattagccgcgacaacagcaaaaataccttatacttacagatgaattctttacgcgccgaggatacggccgtttattattgtgccaccttaggtccaaacgaccactggggtcagtggggccaaggtaccttagtgaccgtgtcttctggtggcagcagccgttcttcttcttctggtggcggtggtagcggcggcggtggcgaaatcgtgctgacccaaagcccggccaccctgagcctgagcccgggcgaacgcgccaccttatcttgccgtgcgtctcagtctgtttctagctcttacttagcgtggtaccagcaaaaaccaggccaggccccacgtttactgatctacggcgcgagctctcgtgccacgggtattccagcccgcttcagcggcagcggtagcggcaccgactttaccctgacgatcagccgtctggagccagaagatttcgccgtttattactgtctgcaatataacagcaccccatggaccttcggtcaaggcaccaaagttgagatcaaa

SEQ ID NO: 1138 - DNA, 741 bp, synthetic construct
  source 1..741: mol_type = other DNA
caggtgcagttagttgaaagcggcggtggtgtggtgcaaccgggtcgtagcttacgtttatcttgcgcggcctctggctttacctttagcagctatgcgatgcattgggtgcgtcaggcgccaggtaagggcttagagtgggtggcggttatctcttatgacggtagcaacaagtactacgccgatagcgttaaaggccgcttcacgattagccgcgacaacagcaaaaataccttatacttacagatgaattctttacgcgccgaggatacggccgtttattattgttctcgtaaggttggtgccttcggtaactggggccagtggggtcaaggcacgctggtgaccgtttcttctggcggcagcagccgctcttcttcttctggcggtggtggcagcggcggtggcggcgagattgtgctgacgcagagcccagcgaccctgagcctgagcccgggcgagcgcgcgacgttaagctgccgtgccagccaatctgttagctcttcttacctggcctggtatcaacagaagccgggccaagccccgcgcctgttaatctatggcgcgtctagccgcgccacgggcatcccagcccgctttagcggctctggcagcggcacggattttaccttaacgattagccgtttagagccggaagacttcgccgtgtactactgcacgagctacaccagctctagcgagttatacgcgtttggccaaggtacgaaggtggagattaaa

SEQ ID NO: 1139 - DNA, 741 bp, synthetic construct
  source 1..741: mol_type = other DNA
caggtgcagttagttgaaagcggcggtggtgtggtgcaaccgggtcgtagcttacgtttatcttgcgcggcctctggctttacctttagcagctatgcgatgcattgggtgcgtcaggcgccaggtaagggcttagagtgggtggcggttatctcttatgacggtagcaacaagtactacgccgatagcgttaaaggccgcttcacgattagccgcgacaacagcaaaaataccttatacttacagatgaattctttacgcgccgaggatacggccgtttattattgtacgcgtgacttcatcggtcgcggtttcgattattggggtcaatggggccaaggcaccctggttacggttagcagcggcggctcttctcgctcttctagctctggtggcggcggctctggcggcggtggcgaaattgttctgacccaaagcccggcgaccctgagcctgagcccaggtgaacgcgccaccctgagctgtcgtgcctctcaaagcgtttcttctagctacctggcctggtatcaacagaaaccaggtcaggccccgcgcttactgatttatggtgcgtcttctcgcgcgacgggtatcccagcgcgtttttctggcagcggctctggcaccgatttcacgctgaccatttctcgcctggaaccagaggactttgccgtttattactgccaacagcgttacagcgccccatacacctttggccaaggtacgaaggtggagattaaa

SEQ ID NO: 1140 - DNA, 750 bp, synthetic construct
  source 1..750: mol_type = other DNA
caggtgcagttagttgaaagcggcggtggtgtggtgcaaccgggtcgtagcttacgtttatcttgcgcggcctctggctttacctttagcagctatgcgatgcattgggtgcgtcaggcgccaggtaagggcttagagtgggtggcggttatctcttatgacggtagcaacaagtactacgccgatagcgttaaaggccgcttcacgattagccgcgacaacagcaaaaataccttatacttacagatgaattctttacgcgccgaggatacggccgtttattattgtgttcgtgccttctcttactcttggccattcgatcattggggtcaatggggccaaggcaccctggttacggttagcagcggcggctcttctcgctcttctagctctggtggcggcggctctggcggcggtggcgaaattgttctgacccaaagcccggcgaccctgagcctgagcccaggtgaacgcgccaccctgagctgtcgtgcctctcaaagcgtttcttctagctacctggcctggtatcaacagaaaccaggtcaggccccgcgcttactgatttatggtgcgtcttctcgcgcgacgggtatcccagcgcgtttttctggcagcggctctggcaccgatttcacgctgaccatttctcgcctggaaccagaggactttgccgtttattactgccaacagtataagaattggcacccaacgtggagctttggccaaggtacgaaggtggagattaaa

SEQ ID NO: 1141 - DNA, 759 bp, synthetic construct
  source 1..759: mol_type = other DNA
caggtgcagttagttgaaagcggcggtggtgtggtgcaaccgggtcgtagcttacgtttatcttgcgcggcctctggctttacctttagcagctatgcgatgcattgggtgcgtcaggcgccaggtaagggcttagagtgggtggcggttatctcttatgacggtagcaacaagtactacgccgatagcgttaaaggccgcttcacgattagccgcgacaacagcaaaaataccttatacttacagatgaattctttacgcgccgaggatacggccgtttattattgtgttcgtgactctgttggttaccgcgaccagccgggttactatttagattattggggccaatggggtcaaggcaccctggtgacggtttcttctggtggctcttctcgtagcagctctagcggcggtggcggcagcggtggcggcggtgaaattgtgctgacccagagcccggccacgctgtctttaagcccgggcgagcgtgccacgttaagctgtcgcgccagccaaagcgttagctctagctatttagcctggtatcaacagaagccaggccaggcgccacgtttattaatctatggtgcctcttctcgtgcgaccggtattccggcgcgctttagcggctctggtagcggcaccgacttcaccctgacgatctctcgtttagagccggaggatttcgcggtgtactattgtcaacaatataatagctacccatctacgtttggtcagggcaccaaggttgagattaaa

SEQ ID NO: 1142 - DNA, 744 bp, synthetic construct
  source 1..744: mol_type = other DNA
caggtgcagttagttgaaagcggcggtggtgtggtgcaaccgggtcgtagcttacgtttatcttgcgcggcctctggctttacctttagcagctatgcgatgcattgggtgcgtcaggcgccaggtaagggcttagagtgggtggcggttatctcttatgacggtagcaacaagtactacgccgatagcgttaaaggccgcttcacgattagccgcgacaacagcaaaaataccttatacttacagatgaattctttacgcgccgaggatacggccgtttattattgtgttcgtaagaaccaaacggccggtggtcattggggccaatggggtcagggtaccctggtgacggtttctagcggcggcagctctcgctcttcttctagcggtggtggcggcagcggtggcggcggtgaaattgtgttaacccagtctccggcgaccctgagcctgagcccgggtgagcgtgccacgctgagctgccgcgcgtctcaatctgtgtcttcttcttatttagcgtggtaccagcaaaaaccgggtcaagcgccacgtttattaatttatggcgccagctctcgcgccaccggtatcccagcccgttttagcggtagcggcagcggtaccgattttacgttaaccattagccgcttagaaccggaggacttcgcggtttactattgtcaggtttgggatagccgcgcggaccactgggtttttggccagggtacgaaggttgaaatcaaa

SEQ ID NO: 1143 - DNA, 738 bp, synthetic construct
  source 1..738: mol_type = other DNA
caggtgcagttagttgaaagcggcggtggtgtggtgcaaccgggtcgtagcttacgtttatcttgcgcggcctctggctttacctttagcagctatgcgatgcattgggtgcgtcaggcgccaggtaagggcttagagtgggtggcggttatctcttatgacggtagcaacaagtactacgccgatagcgttaaaggccgcttcacgattagccgcgacaacagcaaaaataccttatacttacagatgaattctttacgcgccgaggatacggccgtttattattgtgttcgtcgcggtgccaagggtttaggttattggggccaatggggtcagggtaccctggtgacggtttctagcggcggcagctctcgctcttcttctagcggtggtggcggcagcggtggcggcggtgaaattgtgttaacccagtctccggcgaccctgagcctgagcccgggtgagcgtgccacgctgagctgccgcgcgtctcaatctgtgtcttcttcttatttagcgtggtaccagcaaaaaccgggtcaagcgccacgtttattaatttatggcgccagctctcgcgccaccggtatcccagcccgttttagcggtagcggcagcggtaccgattttacgttaaccattagccgcttagaaccggaggacttcgcggtttactattgtcgtcaaggcagccgctggccgtgggccttcggtcagggcaccaaggttgagatcaaa

SEQ ID NO: 1144 - DNA, 762 bp, synthetic construct
  source 1..762: mol_type = other DNA
caggtgcagttagttgaaagcggcggtggtgtggtgcaaccgggtcgtagcttacgtttatcttgcgcggcctctggctttacctttagcagctatgcgatgcattgggtgcgtcaggcgccaggtaagggcttagagtgggtggcggttatctcttatgacggtagcaacaagtactacgccgatagcgttaaaggccgcttcacgattagccgcgacaacagcaaaaataccttatacttacagatgaattctttacgcgccgaggatacggccgtttattattgtgttcgtcgcccacgctggttcgactctgcctattatgccccatttgagaattggggccagtggggtcaaggtaccctggtgaccgtttcttctggtggtagctctcgcagcagcagctctggcggcggtggcagcggcggtggcggcgagattgtgctgacccagagcccggcgacgttaagcttatctccgggcgaacgcgcgacgttatcttgccgcgcctctcagtctgtgtctagctcttatctggcctggtaccagcaaaaaccaggtcaggcgccgcgcctgttaatctacggcgcctcttctcgcgcgaccggcatcccggcgcgtttcagcggcagcggttctggcaccgatttcacgctgaccatctctcgcctggagccagaagactttgccgtgtattactgctcttcttacaccagcagctctacgttagtttttggtcagggcaccaaggttgagattaaa

SEQ ID NO: 1145 - DNA, 750 bp, synthetic construct
  source 1..750: mol_type = other DNA
caggtgcagttagttgaaagcggcggtggtgtggtgcaaccgggtcgtagcttacgtttatcttgcgcggcctctggctttacctttagcagctatgcgatgcattgggtgcgtcaggcgccaggtaagggcttagagtgggtggcggttatctcttatgacggtagcaacaagtactacgccgatagcgttaaaggccgcttcacgattagccgcgacaacagcaaaaataccttatacttacagatgaattctttacgcgccgaggatacggccgtttattattgtgttagcgacaagtctggttctggtttcctgtattggggtcaatggggccaaggcaccctggttacggttagcagcggcggctcttctcgctcttctagctctggtggcggcggctctggcggcggtggcgaaattgttctgacccaaagcccggcgaccctgagcctgagcccaggtgaacgcgccaccctgagctgtcgtgcctctcaaagcgtttcttctagctacctggcctggtatcaacagaaaccaggtcaggccccgcgcttactgatttatggtgcgtcttctcgcgcgacgggtatcccagcgcgtttttctggcagcggctctggcaccgatttcacgctgaccatttctcgcctggaaccagaggactttgccgtttattactgcgccagctttgacagctcttctttaagcgcgtgggtgttcggtcaaggtaccaaggtggaaattaaa

SEQ ID NO: 1146 - DNA, 735 bp, synthetic construct
  source 1..735: mol_type = other DNA
caggtgcagttagttgaaagcggcggtggtgtggtgcaaccgggtcgtagcttacgtttatcttgcgcggcctctggctttacctttagcagctatgcgatgcattgggtgcgtcaggcgccaggtaagggcttagagtgggtggcggttatctcttatgacggtagcaacaagtactacgccgatagcgttaaaggccgcttcacgattagccgcgacaacagcaaaaataccttatacttacagatgaattctttacgcgccgaggatacggccgtttattattgtgttacctacttcggtcgcaaggactactggggccagtggggtcaaggcacgctggtgaccgtttcttctggcggcagcagccgctcttcttcttctggcggtggtggcagcggcggtggcggcgagattgtgctgacgcagagcccagcgaccctgagcctgagcccgggcgagcgcgcgacgttaagctgccgtgccagccaatctgttagctcttcttacctggcctggtatcaacagaagccgggccaagccccgcgcctgttaatctatggcgcgtctagccgcgccacgggcatcccagcccgctttagcggctctggcagcggcacggattttaccttaacgattagccgtttagagccggaagacttcgccgtgtactactgccaacagtactatacctctccgaacacgttcggccagggcacgaaggttgagattaaa

SEQ ID NO: 1147 - DNA, 741 bp, synthetic construct
  source 1..741: mol_type = other DNA
caggtgcagttagttgaaagcggcggtggtgtggtgcaaccgggtcgtagcttacgtttatcttgcgcggcctctggctttacctttagcagctatgcgatgcattgggtgcgtcaggcgccaggtaagggcttagagtgggtggcggttatctcttatgacggtagcaacaagtactacgccgatagcgttaaaggccgcttcacgattagccgcgacaacagcaaaaataccttatacttacagatgaattctttacgcgccgaggatacggccgtttattattgtgttacctacttcggtcgcaaggactactggggccagtggggtcaaggcacgctggtgaccgtttcttctggcggcagcagccgctcttcttcttctggcggtggtggcagcggcggtggcggcgagattgtgctgacgcagagcccagcgaccctgagcctgagcccgggcgagcgcgcgacgttaagctgccgtgccagccaatctgttagctcttcttacctggcctggtatcaacagaagccgggccaagccccgcgcctgttaatctatggcgcgtctagccgcgccacgggcatcccagcccgctttagcggctctggcagcggcacggattttaccttaacgattagccgtttagagccggaagacttcgccgtgtactactgccaagtgtgggacagcagcttagatttatgggttttcggccagggcacgaaggttgagattaaa

SEQ ID NO: 1148 - DNA, 36 bp, synthetic construct
  source 1..36: mol_type = other DNA
tggacccagccaggtaatattgtgacgaacggcgcg

SEQ ID NO: 1149 - DNA, 33 bp, synthetic construct
  source 1..33: mol_type = other DNA
ggcgatctgttaaagattcagtttggtggtgcg

SEQ ID NO: 1150 - DNA, 27 bp, synthetic construct
  source 1..27: mol_type = other DNA
agcatgagccaatctctgagcctggcg

SEQ ID NO: 1151 - DNA, 39 bp, synthetic construct
  source 1..39: mol_type = other DNA
agcagcaccgagaactttattaccttagttgatctggtg

SEQ ID NO: 1152 - DNA, 27 bp, synthetic construct
  source 1..27: mol_type = other DNA
ggcacccatgttatcgcggcggcgcgt

SEQ ID NO: 1153 - DNA, 42 bp, synthetic construct
  source 1..42: mol_type = other DNA
cgtgatgaattcttagcgctgctggttgagcatctgcgcgaa

SEQ ID NO: 1154 - DNA, 27 bp, synthetic construct
  source 1..27: mol_type = other DNA
agcgcggaagactacgtgcgtcagagc

SEQ ID NO: 1155 - DNA, 33 bp, synthetic construct; identical to SEQ ID NO: 1149
  source 1..33: mol_type = other DNA

SEQ ID NO: 1156 - DNA, 27 bp, synthetic construct
  source 1..27: mol_type = other DNA
agcatgagccaatctctgagcctggcg

SEQ ID NO: 1157 - DNA, 39 bp, synthetic construct; identical to SEQ ID NO: 1151
  source 1..39: mol_type = other DNA

SEQ ID NO: 1158 - DNA, 27 bp, synthetic construct
  source 1..27: mol_type = other DNA
ggcacccatgttatcgcggcggcgcgt

SEQ ID NO: 1159 - DNA, 42 bp, synthetic construct; identical to SEQ ID NO: 1153
  source 1..42: mol_type = other DNA

SEQ ID NO: 1160 - DNA, 27 bp, synthetic construct
  source 1..27: mol_type = other DNA
agcgcggaagactacgtgcgtcagagc

SEQ ID NO: 1161 - DNA, 51 bp, synthetic construct
  source 1..51: mol_type = other DNA
agcatttatcaagaccaggaacagcgcatcctgaaattcctggaggaactg

SEQ ID NO: 1162 - DNA, 48 bp, synthetic construct
  source 1..48: mol_type = other DNA
gatattctgaaggttctgtttaaagagttcattgaaatcagcttatgg

SEQ ID NO: 1163 - DNA, 51 bp, synthetic construct
  source 1..51: mol_type = other DNA
aaaaccatggtggacgagctgtttgcggagatcgtgcgtcaaatgaattat

SEQ ID NO: 1164 - DNA, 48 bp, synthetic construct
  source 1..48: mol_type = other DNA
tttgcggattacaacctgctggatttattactgattcaccaggttctg

SEQ ID NO: 1165 - DNA, 45 bp, synthetic construct
  source 1..45: mol_type = other DNA
gaagatggcgttatggcccgtcagctggtttacaccattgccgat

SEQ ID NO: 1166 - DNA, 48 bp, synthetic construct
  source 1..48: mol_type = other DNA
accagcatggcgacgccacatgtgagcggtgttgcgaccttagtgtgg

SEQ ID NO: 1167 - DNA, 36 bp, synthetic construct
  source 1..36: mol_type = other DNA
cgtctggatcgctacgcggatctgatccaaaaactg

SEQ ID NO: 1168 - DNA, 60 bp, synthetic construct
  source 1..60: mol_type = other DNA
tatgaaaatggtgccatgctggaaccgttatctgtggcgttagcgggtctgcagcgcgcg

SEQ ID NO: 1169 - DNA, 36 bp, synthetic construct
  source 1..36: mol_type = other DNA
gaaaaagaaacgaaggaaatggtggcgttcttaaat

SEQ ID NO: 1170 - DNA, 48 bp, synthetic construct
  source 1..48: mol_type = other DNA
cgtagcgaagccatccgtgatctgatccgcgattttatcattcgccat

SEQ ID NO: 1171 - DNA, 36 bp, synthetic construct
  source 1..36: mol_type = other DNA
accattgatatcttaaccgcgattcgcaacgcgacc

SEQ ID NO: 1172 - DNA, 27 bp, synthetic construct
  source 1..27: mol_type = other DNA
gtggatggcgccatccatcgtgcggcg

SEQ ID NO: 1173 - DNA, 36 bp, synthetic construct; identical to SEQ ID NO: 1171
  source 1..36: mol_type = other DNA

SEQ ID NO: 1174 - DNA, 54 bp, synthetic construct
  source 1..54: mol_type = other DNA
tatcagtatttagccgcgcgtctggccatctttcatttacgtaagaaagcgtat

SEQ ID NO: 1175 - DNA, 48 bp, synthetic construct
  source 1..48: mol_type = other DNA
gtgggcccggccatcgcgcgtgatatcatcaatctgtacaatcaacat

SEQ ID NO: 1176 - DNA, 60 bp, synthetic construct
  source 1..60: mol_type = other DNA
gatatgattttcgagatttttaaaaactacctgaccaaggtggcctattatgcccgtcag

SEQ ID NO: 1177 - DNA, 60 bp, synthetic construct
  source 1..60: mol_type = other DNA
ctgggcgaatggatcgccctgaatgtgttcgagttttttacgaatttaaatcagttctat

SEQ ID NO: 1178 - DNA, 33 bp, synthetic construct
  source 1..33: mol_type = other DNA
tttgcgtttgccttacgtaaagcgcaagacacc

SEQ ID NO: 1179 - DNA, 54 bp, synthetic construct
  source 1..54: mol_type = other DNA
ggcgaagaattaatcctgaaaggcatcgaggcgtttaagaattggttaaaaaaa

SEQ ID NO: 1180 - DNA, 33 bp, synthetic construct; identical to SEQ ID NO: 1178
  source 1..33: mol_type = other DNA

SEQ ID NO: 1181 - DNA, 48 bp, synthetic construct
  source 1..48: mol_type = other DNA
catcgtgaattagttcatccggatgccttaaatcgtttcggcaagacc

SEQ ID NO: 1182 - DNA, 57 bp, synthetic construct
  source 1..57: mol_type = other DNA
acccgtaaagccttaaattatgtgccaaagctgtttgaggaattacgtaaaacgtat

SEQ ID NO: 1183 - DNA, 51 bp, synthetic construct
  source 1..51: mol_type = other DNA
cgtgaaaatgttgaccgtgtgaccgaggccctgcgtgccgcgttacagcat

SEQ ID NO: 1184 - DNA, 51 bp, synthetic construct; identical to SEQ ID NO: 1161
  source 1..51: mol_type = other DNA

SEQ ID NO: 1185 - DNA, 54 bp, synthetic construct
  source 1..54: mol_type = other DNA
accgaaaaatacttagattttatgccgaagttatttgatgccgtgcgcaataaa

SEQ ID NO: 1186 - DNA, 48 bp, synthetic construct; identical to SEQ ID NO: 1162
  source 1..48: mol_type = other DNA

SEQ ID NO: 1187 - DNA, 51 bp, synthetic construct; identical to SEQ ID NO: 1163
  source 1..51: mol_type = other DNA

SEQ ID NO: 1188 - DNA, 57 bp, synthetic construct
  source 1..57: mol_type = other DNA
ggcgcggtgtctttagcgagcatgctgacggagatttttttactgcaacaggcgcag

SEQ ID NO: 1189 - DNA, 57 bp, synthetic construct
  source 1..57: mol_type = other DNA
ccggcgttttacttaaccgcgagccaacaacgttgggaagagtatttaaaaaaaggc

SEQ ID NO: 1190 - DNA, 45 bp, synthetic construct; identical to SEQ ID NO: 1165
  source 1..45: mol_type = other DNA

SEQ ID NO: 1191 - DNA, 48 bp, synthetic construct; identical to SEQ ID NO: 1166
  source 1..48: mol_type = other DNA

SEQ ID NO: 1192 - DNA, 36 bp, synthetic construct; identical to SEQ ID NO: 1167
  source 1..36: mol_type = other DNA

SEQ ID NO: 1193 - DNA, 60 bp, synthetic construct; identical to SEQ ID NO: 1168
  source 1..60: mol_type = other DNA

SEQ ID NO: 1194 - DNA, 36 bp, synthetic construct; identical to SEQ ID NO: 1169
  source 1..36: mol_type = other DNA

SEQ ID NO: 1195 - DNA, 48 bp, synthetic construct; identical to SEQ ID NO: 1170
  source 1..48: mol_type = other DNA

SEQ ID NO: 1196 - DNA, 36 bp, synthetic construct; identical to SEQ ID NO: 1171
  source 1..36: mol_type = other DNA

SEQ ID NO: 1197 - DNA, 27 bp, synthetic construct
  source 1..27: mol_type = other DNA
gtggatggcgccatccatcgtgcggcg

SEQ ID NO: 1198 - DNA, 36 bp, synthetic construct; identical to SEQ ID NO: 1171
  source 1..36: mol_type = other DNA

SEQ ID NO: 1199 - DNA, 60 bp, synthetic construct
  source 1..60: mol_type = other DNA
agcctgtattctggtagcaaaggcgccgttgatagcttcgtgcgcattttttctaaagat

SEQ ID NO: 1200 - DNA, 48 bp, synthetic construct; identical to SEQ ID NO: 1175
  source 1..48: mol_type = other DNA

SEQ ID NO: 1201 - DNA, 60 bp, synthetic construct; identical to SEQ ID NO: 1176
  source 1..60: mol_type = other DNA

SEQ ID NO: 1202 - DNA, 60 bp, synthetic construct; identical to SEQ ID NO: 1177
  source 1..60: mol_type = other DNA

SEQ ID NO: 1203 - DNA, 33 bp, synthetic construct; identical to SEQ ID NO: 1178
  source 1..33: mol_type = other DNA

SEQ ID NO: 1204 - DNA, 57 bp, synthetic construct
  source 1..57: mol_type = other DNA
gcgcagcgtcgcaagatggcgcaggaaaacccaaaaatgcataacagcgagattctg

SEQ ID NO: 1205 - DNA, 33 bp, synthetic construct; identical to SEQ ID NO: 1178
  source 1..33: mol_type = other DNA

SEQ ID NO: 1206 - DNA, 48 bp, synthetic construct
  source 1..48: mol_type = other DNA
aaactgaaagacttaagccgttttgacgccagctttttcggcgttcat

SEQ ID NO: 1207 - DNA, 48 bp, synthetic construct; identical to SEQ ID NO: 1181
  source 1..48: mol_type = other DNA

SEQ ID NO: 1208 - DNA, 57 bp, synthetic construct; identical to SEQ ID NO: 1182
  source 1..57: mol_type = other DNA

SEQ ID NO: 1209 - DNA, 54 bp, synthetic construct
  source 1..54: mol_type = other DNA
gcgaaaggccgcgaggaagaagcgcgcaagctgctgcgctggggccaacagaat

SEQ ID NO: 1210 - DNA, 42 bp, synthetic construct
  source 1..42: mol_type = other DNA
cagaccagcttagacgcggcgcagacgttaattcgtggtgcg

SEQ ID NO: 1211 - DNA, 30 bp, synthetic construct
  source 1..30: mol_type = other DNA
ctgccgctggttgactttattattcaaaat

SEQ ID NO: 1212 - DNA, 36 bp, synthetic construct
  source 1..36: mol_type = other DNA
agcagcgtggttcgcggcaaaatggatggtggttgg

SEQ ID NO: 1213 - DNA, 42 bp, synthetic construct
  source 1..42: mol_type = other DNA
cgtgataccatcatcaataccctgaagaaggcgagcaagctg

SEQ ID NO: 1214 - DNA, 39 bp, synthetic construct
  source 1..39: mol_type = other DNA
catggcgatttacaacgttggcagagcgccttagatgcg

SEQ ID NO: 1215 - DNA, 30 bp, synthetic construct
  source 1..30: mol_type = other DNA
gatggcgaaatcaaggaactgctggagaaa

SEQ ID NO: 1216 - DNA, 42 bp, synthetic construct
  source 1..42: mol_type = other DNA
gcgatggtgttagagagcgtgatgtttgccatcctggcggaa

SEQ ID NO: 1217 - DNA, 30 bp, synthetic construct
  source 1..30: mol_type = other DNA
ctgcgtctgttcgttcgtattggcgccatg

SEQ ID NO: 1218 - DNA, 33 bp, synthetic construct
  source 1..33: mol_type = other DNA
ccgattaaagccttaatgcgttatagcgagaat

SEQ ID NO: 1219 - DNA, 39 bp, synthetic construct
  source 1..39: mol_type = other DNA
ggcccgcaggttggttatctgagcgaggcctttgaagcg

SEQ ID NO: 1220 - DNA, 36 bp, synthetic construct
  source 1..36: mol_type = other DNA
aaaagcgtgatcgaggcgctgaaacacggtggcctg

SEQ ID NO: 1221 - DNA, 42 bp, synthetic construct
  source 1..42: mol_type = other DNA
ccggatgcgcaaaacgcgctgctgtcttctctgagcgagcag

SEQ ID NO: 1222 - DNA, 33 bp, synthetic construct
  source 1..33: mol_type = other DNA
accaatgcggacttactggcgcgtgccgccagc

SEQ ID NO: 1223 - DNA, 30 bp, synthetic construct
  source 1..30: mol_type = other DNA
aatgcgggcgccttagcggtgcatcaactg

SEQ ID NO: 1224 - DNA, 36 bp, synthetic construct
  source 1..36: mol_type = other DNA
attccggaagccttacgtctgctgttacaagcgctg

SEQ ID NO: 1225 - DNA, 36 bp, synthetic construct
  source 1..36: mol_type = other DNA
ccggtgggcttagccgcggcggcgtctgcccgtctg

SEQ ID NO: 1226 - DNA, 36 bp, synthetic construct
  source 1..36: mol_type = other DNA
tttgcggcgatcgagagcgtggcgaagaacattcag

SEQ ID NO: 1227 - DNA, 33 bp, synthetic construct
  source 1..33: mol_type = other DNA
gtggaagaagacgttcagctgctgaaggacctg

SEQ ID NO: 1228 - DNA, 39 bp, synthetic construct
  source 1..39: mol_type = other DNA
catctggaattattactgcgtgatttagaggatagccgt

SEQ ID NO: 1229 - DNA, 39 bp, synthetic construct
  source 1..39: mol_type = other DNA
aaaattgcgcaacacaccgcggattacgaggaacgtttt

SEQ ID NO: 1230 - DNA, 39 bp, synthetic construct
  source 1..39: mol_type = other DNA
agcggcgtggccgccctgattaaagttttactgagcctg

SEQ ID NO: 1231 - DNA, 45 bp, synthetic construct
  source 1..45: mol_type = other DNA
accgcgcgtgcccgcaaatttgcgaaccgcattcatggtcgtttt

SEQ ID NO: 1232 - DNA, 36 bp, synthetic construct
  source 1..36: mol_type = other DNA
agctttctggcccgcaatcgtctggttatcgcgctg

SEQ ID NO: 1233 - DNA, 30 bp, synthetic construct
  source 1..30: mol_type = other DNA
gcggcggaagccgccaaagtggcgttagaa

SEQ ID NO: 1234 - DNA, 39 bp, synthetic construct
  source 1..39: mol_type = other DNA
aatattggcgcctctctggcgaaacgcttagaacagacc

SEQ ID NO: 1235 - DNA, 42 bp, synthetic construct
  source 1..42: mol_type = other DNA
gaagcggatatcaaggaacgtaaagagttactgcgtaagttt

SEQ ID NO: 1236 - DNA, 30 bp, synthetic construct; identical to SEQ ID NO: 1215
  source 1..30: mol_type = other DNA

SEQ ID NO: 1237 - DNA, 42 bp, synthetic construct
  source 1..42: mol_type = other DNA
gcggcgcgtatggccacgtatatggataccatcgactatttt

SEQ ID NO: 1238 - DNA, 27 bp, synthetic construct
  source 1..27: mol_type = other DNA
gaatttctgttaacgggcgtgctgaaa

SEQ ID NO: 1239 - DNA, 27 bp, synthetic construct
  source 1..27: mol_type = other DNA
gcgctgggcacgatccgtgatattatt

SEQ ID NO: 1240 - DNA, 30 bp, synthetic construct
  source 1..30: mol_type = other DNA
ccggtggatgttatcaccgcgattaaggcg

SEQ ID NO: 1241 - DNA, 36 bp, synthetic construct
  source 1..36: mol_type = other DNA
tggaatatgctgcgcggtaatgcgacccaagccgcg

SEQ ID NO: 1242 - DNA, 42 bp, synthetic construct
  source 1..42: mol_type = other DNA
agcgaaccggcctgggccaccgcgctgtctgtttttgcggcg

SEQ ID NO: 1243 - DNA, 33 bp, synthetic construct
  source 1..33: mol_type = other DNA
agcgcggcggccaagaaactgattaacgactat

SEQ ID NO: 1244 - DNA, 24 bp, synthetic construct
  source 1..24: mol_type = other DNA
agcgcggaaatcttaagcgcgagc

SEQ ID NO: 1245 - DNA, 39 bp, synthetic construct
  source 1..39: mol_type = other DNA
gatggcaccttcttacgtgcggcggagttagcgcgtaat

SEQ ID NO: 1246 - DNA, 24 bp, synthetic construct
  source 1..24: mol_type = other DNA
cgtaccgaattaatgcaagcgagc

SEQ ID NO: 1247 - DNA, 33 bp, synthetic construct
  source 1..33: mol_type = other DNA
cagcagaatttaatcctgcattatcaagccgtg

SEQ ID NO: 1248 - DNA, 39 bp, synthetic construct
  source 1..39: mol_type = other DNA
gcgcgtgcgtactacctgctgggcttagcctatgatggc

SEQ ID NO: 1249 - DNA, 36 bp, synthetic construct
  source 1..36: mol_type = other DNA
accgaaattgccgttgatattgcgcgctctgtggaa

SEQ ID NO: 1250 - DNA, 33 bp, synthetic construct
  source 1..33: mol_type = other DNA
cagcagggccaagccctggcggcgacggccaat

SEQ ID NO: 1251 - DNA, 30 bp, synthetic construct
  source 1..30: mol_type = other DNA
agccaggatatccgcgcgctggcggacgcg

SEQ ID NO: 1252 - DNA, 24 bp, synthetic construct
  source 1..24: mol_type = other DNA
ggctatagcttagttgcgcgtaaa

SEQ ID NO: 1253 - DNA, 30 bp, synthetic construct
  source 1..30: mol_type = other DNA
tggccgaaagagcgcgatgcggcgacgctg

SEQ ID NO: 1254 - DNA, 27 bp, synthetic construct
  source 1..27: mol_type = other DNA
attccgcatgttcaacgtctgattggc

SEQ ID NO: 1255 - DNA, 24 bp, synthetic construct
  source 1..24: mol_type = other DNA
gatctggcggttgttaaagcggcg

SEQ ID NO: 1256 - DNA, 42 bp, synthetic construct
  source 1..42: mol_type = other DNA
accccgggcatgatcatggccagcgaagcgttattacgtaaa

SEQ ID NO: 1257 - DNA, 39 bp, synthetic construct
  source 1..39: mol_type = other DNA
gcggaacagttcatcggcatgagcggctctggttatagc

SEQ ID NO: 1258 - DNA, 36 bp, synthetic construct
  source 1..36: mol_type = other DNA
aaagaagaaatcgaggaagtggtgtctgagaccgtg

SEQ ID NO: 1259 - DNA, 39 bp, synthetic construct
  source 1..39: mol_type = other DNA
caggaaggcatgtaccaacattttaaagccatcgcggaa

SEQ ID NO: 1260 - DNA, 24 bp, synthetic construct
  source 1..24: mol_type = other DNA
gcgagcctggccgccctggcgctg

SEQ ID NO: 1261 - DNA, 42 bp, synthetic construct
  source 1..42: mol_type = other DNA
agccgtgcgacgttagcgaatattgaccgcgcgcgtgagcag

SEQ ID NO: 1262 - DNA, 30 bp, synthetic construct
  source 1..30: mol_type = other DNA
aatgtggcggacatcattcgtcgtgtttgg

SEQ ID NO: 1263 - DNA, 27 bp, synthetic construct
  source 1..27: mol_type = other DNA
attctggatgcctctctggaactgttt

SEQ ID NO: 1264 - DNA, 33 bp, synthetic construct
  source 1..33: mol_type = other DNA
aaaacccagttaatcgatgtgattgccgagaaa

SEQ ID NO: 1265 - DNA, 30 bp, synthetic construct
  source 1..30: mol_type = other DNA
attgaagcgttcttccgtctggtgaagcgt

SEQ ID NO: 1266 - DNA, 39 bp, synthetic construct
  source 1..39: mol_type = other DNA
gcggaagaaaagtctcgtgcgcgtcgccacctgcgtacc

SEQ ID NO: 1267 - DNA, 30 bp, synthetic construct
  source 1..30: mol_type = other DNA
cgtgatgaaatcttcgcgaccattaacgaa

SEQ ID NO: 1268 - DNA, 33 bp, synthetic construct
  source 1..33: mol_type = other DNA
ctggcgagccgcttctttgcgatgaaacgcagc

SEQ ID NO: 1269 - DNA, 39 bp, synthetic construct
  source 1..39: mol_type = other DNA
caggtgaccatcgacagcgcgctggccacgcagaaatat

SEQ ID NO: 1270 - DNA, 33 bp, synthetic construct
  source 1..33: mol_type = other DNA
agctttgtgttacaaaaaattgtgtctgccatt

SEQ ID NO: 1271 - DNA, 33 bp, synthetic construct
  source 1..33: mol_type = other DNA
gatgtgatgaaaaaggccagcgaactgcaaaaa

SEQ ID NO: 1272 - DNA, 39 bp, synthetic construct
  source 1..39: mol_type = other DNA
tggggcgcgttacgctatattcgtgacttagcggcggat

SEQ ID NO: 1273 - DNA, 30 bp, synthetic construct
  source 1..30: mol_type = other DNA
cgtaaaattatgtctttaagcaataaactg

SEQ ID NO: 1274 - DNA, 27 bp, synthetic construct
  source 1..27: mol_type = other DNA
caggaagatttagcccgtgaaaaagcg

SEQ ID NO: 1275 - DNA, 33 bp, synthetic construct
  source 1..33: mol_type = other DNA
ccgctggcgggtatcctgtttattatcgaggaa

SEQ ID NO: 1276 - DNA, 42 bp, synthetic construct
  source 1..42: mol_type = other DNA
gcggaagaaaagttcaaagaaattgccgaggcgtatgacgtg

SEQ ID NO: 1277 - DNA, 36 bp, synthetic construct
  source 1..36: mol_type = other DNA
aaagtgaaacaagccgatgcgctgtcttctaaaacc

SEQ ID NO: 1278 - DNA, 39 bp, synthetic construct
  source 1..39: mol_type = other DNA
agccagggccaatcttatggcatgttttctgccctggcg

SEQ ID NO: 1279 - DNA, 30 bp, synthetic construct
  source 1..30: mol_type = other DNA
caggaagcggcccaaaaagtggtggagcag

SEQ ID NO: 1280 - DNA, 27 bp, synthetic construct
  source 1..27: mol_type = other DNA
ggccaggcggccgccgcgaccctgctg

SEQ ID NO: 1281 - DNA, 30 bp, synthetic construct
  source 1..30: mol_type = other DNA
gaagcgattttagccgcgaaagcggccggc

SEQ ID NO: 1282 - DNA, 36 bp, synthetic construct
  source 1..36: mol_type = other DNA
gaatatgcgcgcatcctggaagaacgcgccaccagc

SEQ ID NO: 1283 - DNA, 30 bp, synthetic construct
  source 1..30: mol_type = other DNA
cagggcattatcgaccattttcagaaggcg

SEQ ID NO: 1284 - DNA, 30 bp, synthetic construct
  source 1..30: mol_type = other DNA
gatattgcgttatggtctggcctggcgggc

SEQ ID NO: 1285 - DNA, 36 bp, synthetic construct
  source 1..36: mol_type = other DNA
gcgaaagcgcactacgatggcattgttgcctttagc

SEQ ID NO: 1286 - DNA, 42 bp, synthetic construct; identical to SEQ ID NO: 1237
  source 1..42: mol_type = other DNA

SEQ ID NO: 1287 - DNA, 42 bp, synthetic construct
  source 1..42: mol_type = other DNA
gtgccgcaggccatgacggcgtttgcggagttcctgaatcgt

SEQ ID NO: 1288 - DNA, 39 bp, synthetic construct
  source 1..39: mol_type = other DNA
acctggtatcgcacgattcaggatcgcacgattaccgat

SEQ ID NO: 1289 - DNA, 30 bp, synthetic construct
  source 1..30: mol_type = other DNA
cagcgtgatttattaatgtatgcggtgggc

SEQ ID NO: 1290 - DNA, 39 bp, synthetic construct
  source 1..39: mol_type = other DNA
accggcgcgttaggtctgattagcgactggttactgacc

SEQ ID NO: 1291 - DNA, 30 bp, synthetic construct
  source 1..30: mol_type = other DNA
ccggtgaccacgggtttttatgaagccatt

SEQ ID NO: 1292 - DNA, 36 bp, synthetic construct
  source 1..36: mol_type = other DNA
ctgattcgtatgttcaagcgtctggaagagttagtg

SEQ ID NO: 1293 - DNA, 36 bp, synthetic construct
  source 1..36: mol_type = other DNA
ggcttttttacggcccagaccctgcacgttgcggtg

SEQ ID NO: 1294 - DNA, 39 bp, synthetic construct
  source 1..39: mol_type = other DNA
ttttatccggccgccgcgtttattgaccgcgcgctgagc

SEQ ID NO: 1295 - DNA, 54 bp, synthetic construct
  source 1..54: mol_type = other DNA
agcgaagaagaggcccgtctgaaaaagtctgcggatacgctgtggggtattcag

SEQ ID NO: 1296 - DNA, 36 bp, synthetic construct
  source 1..36: mol_type = other DNA
accattccggttttactggatattgccgagcgtacc

SEQ ID NO: 1297 - DNA, 39 bp, synthetic construct
  source 1..39: mol_type = other DNA
ccgctgctgaaggccagcattaaagagacgctgcgtctg

SEQ ID NO: 1298 - DNA, 42 bp, synthetic construct
  source 1..42: mol_type = other DNA
cgtggcgatgccgaggtggtgatttctgagtgggatcaggtg

SEQ ID NO: 1299 - DNA, 33 bp, synthetic construct
  source 1..33: mol_type = other DNA
attgaagatgttatccaggcgaatgttaaggcg

SEQ ID NO: 1300 - DNA, 30 bp, synthetic construct
  source 1..30: mol_type = other DNA
aataccctggaggagattatttttaagctg

SEQ ID NO: 1301 - DNA, 27 bp, synthetic construct
  source 1..27: mol_type = other DNA
cgtgcggcgacggttggcagcctggcg

SEQ ID NO: 1302 - DNA, 60 bp, synthetic construct
  source 1..60: mol_type = other DNA
tggcgtgaaatcttagaacgtgatgttcgcaatattatcacctactttagccgcacctat

SEQ ID NO: 1303 - DNA, 24 bp, synthetic construct
  source 1..24: mol_type = other DNA
ccgaccattgccttcgcgcatgat

SEQ ID NO: 1304 - DNA, 24 bp, synthetic construct
  source 1..24: mol_type = other DNA
gcgaatgtgtctgccgcgattagc

SEQ ID NO: 1305 - DNA, 27 bp, synthetic construct
  source 1..27: mol_type = other DNA
ggcctggaagaggttctgtatgaactg

SEQ ID NO: 1306 - DNA, 36 bp, synthetic construct
  source 1..36: mol_type = other DNA
gataccctgcgcgcccgtgcggtggccgccgcgcgt

SEQ ID NO: 1307 - DNA, 33 bp, synthetic construct
  source 1..33: mol_type = other DNA
ccgagcaaaacgttaatggataattatgaggtg

SEQ ID NO: 1308 - DNA, 42 bp, synthetic construct
  source 1..42: mol_type = other DNA
gatcaggaagccgttaccgcgattgagaagtttgtggacgat

SEQ ID NO: 1309 - DNA, 27 bp, synthetic construct
  source 1..27: mol_type = other DNA
ccggaagcggccgacatggtgtttacc

SEQ ID NO: 1310 - DNA, 33 bp, synthetic construct
  source 1..33: mol_type = other DNA
agcgcgagccaagccgaacagtttttaaagctg

SEQ ID NO: 1311 - DNA, 36 bp, synthetic construct
  source 1..36: mol_type = other DNA
gcgtttcgtgagatgtctgatatgattctgcaagcg

SEQ ID NO: 1312 - DNA, 27 bp, synthetic construct
  source 1..27: mol_type = other DNA
accaatagcatgcgcatgatgcaacag

SEQ ID NO: 1313 - DNA, 33 bp, synthetic construct
  source 1..33: mol_type = other DNA
ggcccggaaggtatgacgagctttatgcgtagc

SEQ ID NO: 1314 - DNA, 30 bp, synthetic construct
  source 1..30: mol_type = other DNA
attgaacgtatcaacgaactggtggcctat

SEQ ID NO: 1315 - DNA, 42 bp, synthetic construct
  source 1..42: mol_type = other DNA
catctgctggaccaatttgcgaccgccatgatcgaacgtacc

SEQ ID NO: 1316 - DNA, 24 bp, synthetic construct
  source 1..24: mol_type = other DNA
gtgaccgaaatcgccaaaaaactg

SEQ ID NO: 1317 - DNA, 45 bp, synthetic construct
  source 1..45: mol_type = other DNA
ggcgcgcaggttcaagcgctggcggacgccgcgctggaggcgttt

SEQ ID NO: 1318 - DNA, 48 bp, synthetic construct
  source 1..48: mol_type = other DNA
accgcgagcttattaagcaatgtgacggacgaactgcgccgtatgacc

SEQ ID NO: 1319 - DNA, 54 bp, synthetic construct
  source 1..54: mol_type = other DNA
ccgctgctgcaacaaattcataatatcacgagctttatccgtcaagcgaaagcg

SEQ ID NO: 1320 - DNA, 48 bp, synthetic construct
  source 1..48: mol_type = other DNA
cgtcataccatcgttaattttgtggagcaaagcctgatcgtggacatg

SEQ ID NO: 1321 - DNA, 48 bp, synthetic construct
  source 1..48: mol_type = other DNA
caggcgcatgccgaggcgtgggcggcgttacgccatctggccgaacgt

SEQ ID NO: 1322 - DNA, 54 bp, synthetic construct
  source 1..54: mol_type = other DNA
attgtggatttattacagattgtgaaccaaattacccaaaaattacgtcagatt

SEQ ID NO: 1323 - DNA, 48 bp, synthetic construct
  source 1..48: mol_type = other DNA
gcggcggatttaaaggcggtgcaggacaagctgaaaacgtttgttgaa

SEQ ID NO: 1324 - DNA, 48 bp, synthetic construct
  source 1..48: mol_type = other DNA
cagaccgcgtctcacgcgctggatgccgccctggaattagcggccgat

SEQ ID NO: 1325 - DNA, 54 bp, synthetic construct
  source 1..54: mol_type = other DNA
caggcgtttgttgacgcgacctggccgcaagccgcgaaagccgcgcaaagcctg

SEQ ID NO: 1326 - DNA, 51 bp, synthetic construct
  source 1..51: mol_type = other DNA
cgtggccatcaaaagctgattaatgccacggtggaaaaggcgcgcgaagtg

SEQ ID NO: 1327 - DNA, 54 bp, synthetic construct
  source 1..54: mol_type = other DNA
gcgagcattttcttcgcgattaaagacgccattcgtgccgcgcgcgcgcagcat

SEQ ID NO: 1328 - DNA, 48 bp, synthetic construct
  source 1..48: mol_type = other DNA
gaacaggaacaccgcaaacgtgtgatccgcgaactgaacagcttaatt

SEQ ID NO: 1329 - DNA, 45 bp, synthetic construct
  source 1..45: mol_type = other DNA
gcgccggcgcgcttacattggctggcgacgttactgatggatgcg

SEQ ID NO: 1330 - DNA, 48 bp, synthetic construct
  source 1..48: mol_type = other DNA
aaaggctttcacgccattcagacccaccgcctggcgcactggctgtat

SEQ ID NO: 1331 - DNA, 48 bp, synthetic construct
  source 1..48: mol_type = other DNA
ctgaaagatttagttcgtaaagcggaggagattggccgcgaattaagc

SEQ ID NO: 1332 - DNA, 54 bp, synthetic construct; identical to SEQ ID NO: 1174
  source 1..54: mol_type = other DNA

SEQ ID NO: 1333 - DNA, 45 bp, synthetic construct
  source 1..45: mol_type = other DNA
ccggtgggcgacgttaaagaactgggtgccattcaggaggtgttt

SEQ ID NO: 1334 - DNA, 54 bp, synthetic construct
  source 1..54: mol_type = other DNA
acccaggcgttattacgttttctggccgaccatagccgcagcaaggataccgtg

SEQ ID NO: 1335 - DNA, 54 bp, synthetic construct
  source 1..54: mol_type = other DNA
ggccgtgatttagccctgctgggccgcttctatgcggaggcgttagtggatagc

SEQ ID NO: 1336 - DNA, 48 bp, synthetic construct
  source 1..48: mol_type = other DNA
gcggaactgcgctctaccttttttcgcgccctgagcgacgcgcaaaat

SEQ ID NO: 1337 - DNA, 60 bp, synthetic construct
  source 1..60: mol_type = other DNA
ccgcgtgaagaggagcgtctgaaagcctctgcgaaagcccgttctcgtaccttacaggaa

SEQ ID NO: 1338 - DNA, 51 bp, synthetic construct
  source 1..51: mol_type = other DNA
caggaacaggcccaagcgggcgaagacaacctgggcgcccaggccgcggcg

SEQ ID NO: 1339 - DNA, 54 bp, synthetic construct
  source 1..54: mol_type = other DNA
gtggatgaattaatgatgcgcctgatggcggcgatggagatctttaccgcccag

SEQ ID NO: 1340 - DNA, 39 bp, synthetic construct
  source 1..39: mol_type = other DNA
gaaatggaaacggttattccggtggacgttatgcgtcgt

SEQ ID NO: 1341 - DNA, 54 bp, synthetic construct
  source 1..54: mol_type = other DNA
attgcggaaaaggttcagtatatgattgagtggtggacgaaaagcggtgaactg

SEQ ID NO: 1342 - DNA, 57 bp, synthetic construct
  source 1..57: mol_type = other DNA
aaagaagtgcgcgccagcgcgaaagccttagtgcagaagtggaccaacgaagtgttt

SEQ ID NO: 1343 - DNA, 48 bp, synthetic construct
  source 1..48: mol_type = other DNA
ccggcgatgaaacaaatcaaacgtaaaatccaagaatttcaccgtacc

SEQ ID NO: 1344 - DNA, 57 bp, synthetic construct
  source 1..57: mol_type = other DNA
gaaaccacccaagagcgtctgcgttctggttatgaagacgcggttgattataaccgt

SEQ ID NO: 1345 - DNA, 54 bp, synthetic construct
  source 1..54: mol_type = other DNA
gtgcaggtggccgaggaagcgattgttaacgcgatgcgtgttctgtactatcgt

SEQ ID NO: 1346 - DNA, 48 bp, synthetic construct
  source 1..48: mol_type = other DNA
tatgcgctgggtgttcgtagcggcttacaagaactggccccgcacctg

SEQ ID NO: 1347 - DNA, 36 bp, synthetic construct; identical to SEQ ID NO: 1306
  source 1..36: mol_type = other DNA

SEQ ID NO: 1348 - DNA, 60 bp, synthetic construct
  source 1..60: mol_type = other DNA
gtggaagaagttcgcgaactgctggagtggtacaataatatgaaccgtttactgaaaatg

SEQ ID NO: 1349 - DNA, 48 bp, synthetic construct
  source 1..48: mol_type = other DNA
accgaactgaagcacaccctggaatctgagggccgtgagctggttaaa

SEQ ID NO: 1350 - DNA, 54 bp, synthetic construct
  source 1..54: mol_type = other DNA
accgatacctacgttacccgtattcgcgccgcggtgcaagcgcgccagcgtatt

SEQ ID NO: 1351 - DNA, 45 bp, synthetic construct
  source 1..45: mol_type = other DNA
agcgaagaacgcgcccatcgtcgtatgttacaactgcaggttaaa

SEQ ID NO: 1352 - DNA, 57 bp, synthetic construct
  source 1..57: mol_type = other DNA
accaccaccgccgttgtggtggcgggtgagctgctgcgcaaagccgaagaattactg

SEQ ID NO: 1353 - DNA, 54 bp, synthetic construct
  source 1..54: mol_type = other DNA
ggcggcccgttaggtctgatgcaggcggttttagatcatacgattccatatctg

SEQ ID NO: 1354 - DNA, 48 bp, synthetic construct
  source 1..48: mol_type = other DNA
attttttatgccgagctggcgcgtggtatcgaagatatcgcgacgatg

SEQ ID NO: 1355 - DNA, 51 bp, synthetic construct
  source 1..51: mol_type = other DNA
agcgaagaaatcaagaaaaaagcgttagagtttgtgaagtatatcaatagc

SEQ ID NO: 1356 - DNA, 54 bp, synthetic construct
  source 1..54: mol_type = other DNA
gcggaacagttattaagccaggcgcgcgactttattaaccagtactatagcagc

SEQ ID NO: 1357 - DNA, 45 bp, synthetic construct
  source 1..45: mol_type = other DNA
attctgcatttagttggcgatgtggttgccctgctggaggcgatt

SEQ ID NO: 1358 - DNA, 60 bp, synthetic construct
  source 1..60: mol_type = other DNA
gcggtggcgcgcgccgcgctgattaacatggtttttcagatgggtgaaacgggcgtggcg

SEQ ID NO: 1359 - DNA, 42 bp, synthetic construct
  source 1..42: mol_type = other DNA
gcggcgggcatcgccgcgctggcgttctctctgaatgagctg

SEQ ID NO: 1360 - DNA, 51 bp, synthetic construct
  source 1..51: mol_type = other DNA
tttgcgcgtgttgttgaaaccgtgtctgaggcgatgagcggtctgttagcg

SEQ ID NO: 1361 - DNA, 48 bp, synthetic construct
  source 1..48: mol_type = other DNA
agcgtgaatttattaaaaagccatttagaggaactggccaaaaagcag

SEQ ID NO: 1362 - DNA, 51 bp, synthetic construct
  source 1..51: mol_type = other DNA
ccgtttgcgttaaagccgctgattgcctggacggaacgtgagcgtgccgcg

SEQ ID NO: 1363 - DNA, 51 bp, synthetic construct
  source 1..51: mol_type = other DNA
gcgcaggcgttcttaagcgaagaacaagcctttgtgaacagcatcctgaat

SEQ ID NO: 1364 - DNA, 57 bp, synthetic construct
  source 1..57: mol_type = other DNA
cagcagctgcgcgacgcgattgaagagtacggcaatgccattcgccagctggccgcg

SEQ ID NO: 1365 - DNA, 54 bp, synthetic construct
  source 1..54: mol_type = other DNA
gtgccgtttaacatcgcgagctatgccttactgaccatgatgatcgcgcaagtg

SEQ ID NO: 1366 - DNA, 45 bp, synthetic construct
  source 1..45: mol_type = other DNA
cgtgatcagatcttactgcgtctgttagccagcgcgttacagatt

SEQ ID NO: 1367 - DNA, 45 bp, synthetic construct
  source 1..45: mol_type = other DNA
gcgggcgcgacgatcctgcgtctggccaaggatctggccgaaaat

SEQ ID NO: 1368 - DNA, 57 bp, synthetic construct
  source 1..57: mol_type = other DNA
gaagaaggcttacgcatgaatattagcgttggtattcagtacattgccagctggctg

SEQ ID NO: 1369 - DNA, 57 bp, synthetic construct
  source 1..57: mol_type = other DNA
aaaagcctgatccaagattatgatgccgagatggcggaatacatgaaaaagcgtacc

SEQ ID NO: 1370 - DNA, 48 bp, synthetic construct
  source 1..48: mol_type = other DNA
gtgggcgcggttaaggcggcgaccgacgccggcgcggccgcggcccgt

SEQ ID NO: 1371 - DNA, 54 bp, synthetic construct
  source 1..54: mol_type = other DNA
catgcggcggagttagcgaaagcggaggccggcgtggccgaaatggccgcgaaa

SEQ ID NO: 1372 - DNA, 60 bp, synthetic construct
  source 1..60: mol_type = other DNA
gaagaagaaaaggagaaatatgcggagatggcccgtgaatggcgcgcggcccagggcaaa

SEQ ID NO: 1373 - DNA, 48 bp, synthetic construct; identical to SEQ ID NO: 1321
  source 1..48: mol_type = other DNA

SEQ ID NO: 1374 - DNA, 57 bp, synthetic construct
  source 1..57: mol_type = other DNA
cagaatcgtatcgactatctgaaagcccacattggccaagcgtggaaggcgattcag

SEQ ID NO: 1375 - DNA, 54 bp, synthetic construct
  source 1..54: mol_type = other DNA
gatgaacagatcgttgataatattgaggccgtgctgaacgtggttgcgaaaaaa

SEQ ID NO: 1376 - DNA, 57 bp, synthetic construct
  source 1..57: mol_type = other DNA
gaacgtcatttagaccgtaaagcggagttaattgtgcaagtgcgcattctgttaaaa

SEQ ID NO: 1377 - DNA, 48 bp, synthetic construct
  source 1..48: mol_type = other DNA
catcagagcgacgtttggagctttggcgttttactgtgggaaatcttt

SEQ ID NO: 1378 - DNA, 54 bp, synthetic construct
  source 1..54: mol_type = other DNA
ctgccggatttagccgcgcgtattttaccacaggcggcccgtgccctgaaagaa

SEQ ID NO: 1379 - DNA, 48 bp, synthetic construct
  source 1..48: mol_type = other DNA
ccgtatctgggtgcccagattgcgaaggccatggtgaaaggttatcag

SEQ ID NO: 1380 - DNA, 54 bp, synthetic construct
  source 1..54: mol_type = other DNA
gaagaacaggcccgcaaagcgtttgaccgcgcgaccaagctggagcaggaattt

SEQ ID NO: 1381 - DNA, 48 bp, synthetic construct
  source 1..48: mol_type = other DNA
tttgtggatttcttagtgtatgatgttttagatctgcaccgtatcttt

SEQ ID NO: 1382 - DNA, 45 bp, synthetic construct
  source 1..45: mol_type = other DNA
tatgataaagttatcgaacgtattttagagtttattcgcgaaaaa

SEQ ID NO: 1383 - DNA, 57 bp, synthetic construct
  source 1..57: mol_type = other DNA
ggcaaatggtggcgtcgccaactgaatgtgtactggtctcgttggctggttaccgcg

SEQ ID NO: 1384 - DNA, 54 bp, synthetic construct
  source 1..54: mol_type = other DNA
catctgccgcgcatcgaacgttatgttcgcctgctggccgaacacctggcggcg

SEQ ID NO: 1385 - DNA, 45 bp, synthetic construct
  source 1..45: mol_type = other DNA
ccggaagaatacgagaaaaccctggacgagctggtggcccgtacc

SEQ ID NO: 1386 - DNA, 45 bp, synthetic construct
  source 1..45: mol_type = other DNA
gcgagcagcatcatgcaaaccctgttttctcaactgaaacaattt

SEQ ID NO: 1387 - DNA, 54 bp, synthetic construct
  source 1..54: mol_type = other DNA
ctgccgtttggtttcgtgagcatgtttttagccccgtggattgagcgtcgcctg

SEQ ID NO: 1388 - DNA, 54 bp, synthetic construct
  source 1..54: mol_type = other DNA
ctgagcgaagccttaaaagaagcgacgaaggaagtgcacattcgcgcggaaaat

SEQ ID NO: 1389 - DNA, 54 bp, synthetic construct; identical to SEQ ID NO: 1295
  source 1..54: mol_type = other DNA

SEQ ID NO: 1390 - DNA, 45 bp, synthetic construct
  source 1..45: mol_type = other DNA
gatagctataacgagagcattgtgaactggttatatcgtcgccat

SEQ ID NO: 1391 - DNA, 54 bp, synthetic construct
  source 1..54: mol_type = other DNA
attatgtataagggtcatctgaatttaatgtacggcctgtaccagttagtgacc

SEQ ID NO: 1392 - DNA, 57 bp, synthetic construct
  source 1..57: mol_type = other DNA
ggcgcgtattctatcagcgtggcggagcacgcgtttgccctgttactggcgcacgcg

SEQ ID NO: 1393 - DNA, 48 bp, synthetic construct
  source 1..48: mol_type = other DNA
gtgcaggtgacgaactatgtggaagaccgcattattgccctgcgcaat

SEQ ID NO: 1394 - DNA, 51 bp, synthetic construct
  source 1..51: mol_type = other DNA
tttctgccgttcggttatctggtggaccaatggcgttggggcgtttttagc

SEQ ID NO: 1395 - DNA, 54 bp, synthetic construct
  source 1..54: mol_type = other DNA
ccggcgagccgcttcattcgtgtggccttcctgcgtgacgcgatgatcaaaaat

SEQ ID NO: 1396 - DNA, 24 bp, synthetic construct
  source 1..24: mol_type = other DNA
tttcaggaattattcggcccgggc

SEQ ID NO: 1397 - DNA, 51 bp, synthetic construct
  source 1..51: mol_type = other DNA
tggctgctggaggacgcgaaaggcttattcaatgcgacggtgcgcgatgcg

SEQ ID NO: 1398 - DNA, 48 bp, synthetic construct
  source 1..48: mol_type = other DNA
ggcgaacgtgccaagcagctgcgtcgcttcagcattgccaccttacgt

SEQ ID NO: 1399 - DNA, 45 bp, synthetic construct
  source 1..45: mol_type = other DNA
ggcaatgcgatctacgaacgtagcttcgccattattcgcgcggaa

SEQ ID NO: 1400 - DNA, 27 bp, synthetic construct
  source 1..27: mol_type = other DNA
cgtgaaaaattagagaatctgaccgaa

SEQ ID NO: 1401 - DNA, 27 bp, synthetic construct
  source 1..27: mol_type = other DNA
gatgaaaccaagaaggcgcgtatgcag

SEQ ID NO: 1402 - DNA, 27 bp, synthetic construct
  source 1..27: mol_type = other DNA
gaaaatcgtgagatcgcgcagcgtgaa

SEQ ID NO: 1403 - DNA, 27 bp, synthetic construct
  source 1..27: mol_type = other DNA
gaacgtattaagtctaccctgaaagaa

SEQ ID NO: 1404 - DNA, 27 bp, synthetic construct
  source 1..27: mol_type = other DNA
gatgaacagatccgcgaaatgaaaagc

SEQ ID NO: 1405 - DNA, 27 bp, synthetic construct
  source 1..27: mol_type = other DNA
gaaaaagaacgcttagaagcgcagacc

SEQ ID NO: 1406 - DNA, 27 bp, synthetic construct
  source 1..27: mol_type = other DNA
cgtattcatgagacgaatctgaaaaaa

SEQ ID NO: 1407 - DNA, 27 bp, synthetic construct
  source 1..27: mol_type = other DNA
aatgaagaaatcaagaaactgcatacc

SEQ ID NO: 1408 - DNA, 27 bp, synthetic construct
  source 1..27: mol_type = other DNA
gatcagcgtaagcaccataccgaaacc

SEQ ID NO: 1409 - DNA, 27 bp, synthetic construct
  source 1..27: mol_type = other DNA
cgtgatacccgcgagcgtctgcatacc

SEQ ID NO: 1410 - DNA, 27 bp, synthetic construct
  source 1..27: mol_type = other DNA
gatgaaaaacgcatgttaaaaaccacc

SEQ ID NO: 1411 - DNA, 27 bp, synthetic construct
  source 1..27: mol_type = other DNA
aatcaggaattaaaggaagtgcgtgat

SEQ ID NO: 1412 - DNA, 27 bp, synthetic construct
  source 1..27: mol_type = other DNA
gaaaatctgaagaacctggaaaaacat

SEQ ID NO: 1413 - DNA, 27 bp, synthetic construct
  source 1..27: mol_type = other DNA
accgaacatgagaagcaggtgaaagaa

SEQ ID NO: 1414 - DNA, 30 bp, synthetic construct
  source 1..30: mol_type = other DNA
agcagcaaagccaaggaactgaaagaccgt

SEQ ID NO: 1415 - DNA, 30 bp, synthetic construct
  source 1..30: mol_type = other DNA
aatgataaaatcgaggcgattaaatctcat

SEQ ID NO: 1416 - DNA, 30 bp, synthetic construct
  source 1..30: mol_type = other DNA
cgtgaacgtatccgcgaacatctgtctagc

SEQ ID NO: 1417 - DNA, 30 bp, synthetic construct
  source 1..30: mol_type = other DNA
cgtgatgtgcaagaccagctgaaagagaaa

SEQ ID NO: 1418 - DNA, 30 bp, synthetic construct
  source 1..30: mol_type = other DNA
accagcgaattacgcgaagcgatgcgtaaa

SEQ ID NO: 1419 - DNA, 30 bp, synthetic construct
  source 1..30: mol_type = other DNA
cagcaggcggaggacaaaattaaagagctg

SEQ ID NO: 1420 - DNA, 30 bp, synthetic construct
  source 1..30: mol_type = other DNA
aaagaaacccaaaagcagctgattgacgat

SEQ ID NO: 1421 - DNA, 30 bp, synthetic construct
  source 1..30: mol_type = other DNA
cgtgaaggcaaggaccgtacccgtcaactg

SEQ ID NO: 1422 - DNA, 30 bp, synthetic construct
  source 1..30: mol_type = other DNA
gaaaaaattcgccaaaccctggaagacgcg

SEQ ID NO: 1423 - DNA, 30 bp, synthetic construct
  source 1..30: mol_type = other DNA
gataaaattatcaagcgtgcgaatgagaat

SEQ ID NO: 1424 - DNA, 30 bp, synthetic construct
  source 1..30: mol_type = other DNA
cgtgaaggcgccgagaaaattaatcaaaaa

SEQ ID NO: 1425 - DNA, 30 bp, synthetic construct
  source 1..30: mol_type = other DNA
gatgatgtggttaagaaactggattctagc

SEQ ID NO: 1426 - DNA, 30 bp, synthetic construct
  source 1..30: mol_type = other DNA
gatcgtacccgcaagctgatggaagtgacc

SEQ ID NO: 1427 - DNA, 30 bp, synthetic construct
  source 1..30: mol_type = other DNA
gcggaacatgttcaacagattaaagagcat

SEQ ID NO: 1428 - DNA, 30 bp, synthetic construct
  source 1..30: mol_type = other DNA
cgtgatgaattaacgcaggcggcgaagaaa

SEQ ID NO: 1429 - DNA, 30 bp, synthetic construct
  source 1..30: mol_type = other DNA
gcgcagcgtatcaaggaaattcaggaccgt

SEQ ID NO: 1430 - DNA, 30 bp, synthetic construct
  source 1..30: mol_type = other DNA
gaaaatgaaatccaagcgaaagcgaaggaa

SEQ ID NO: 1431 - DNA, 30 bp, synthetic construct
  source 1..30: mol_type = other DNA
agcgatgatatccgcaaactgctggagagc

SEQ ID NO: 1432 - DNA, 30 bp, synthetic construct
  source 1..30: mol_type = other DNA
aaagatagcttaaagaaaattcattctatt

SEQ ID NO: 1433 - DNA, 30 bp, synthetic construct
  source 1..30: mol_type = other DNA
aaaaaagatatcgacgataccattaagagc

SEQ ID NO: 1434 - DNA, 30 bp, synthetic construct
  source 1..30: mol_type = other DNA
aaaaaagaattaaaggaactgctgcaaacc

SEQ ID NO: 1435 - DNA, 30 bp, synthetic construct
  source 1..30: mol_type = other DNA
cgtgatctgacggagcgtgcgatgcgtcag

SEQ ID NO: 1436 - DNA, 30 bp, synthetic construct
  source 1..30: mol_type = other DNA
attgatacccgcttagaaaaactgaagaat

SEQ ID NO: 1437 - DNA, 30 bp, synthetic construct
  source 1..30: mol_type = other DNA
cagattgatgagcaccatgcggtgcgcacc

SEQ ID NO: 1438 - DNA, 30 bp, synthetic construct
  source 1..30: mol_type = other DNA
gcggaagaaacgatcaaagaactgaagaat

SEQ ID NO: 1439 - DNA, 30 bp, synthetic construct
  source 1..30: mol_type = other DNA
gaaaaagatacggttgatcaggtgcgcatt

SEQ ID NO: 1440 - DNA, 30 bp, synthetic construct
  source 1..30: mol_type = other DNA
gatgatgaaacgttacgtaatgtgaagagc

SEQ ID NO: 1441 - DNA, 30 bp, synthetic construct
  source 1..30: mol_type = other DNA
cgtgatgaattacaccgtctgctgacgcag

SEQ ID NO: 1442 - DNA, 30 bp, synthetic construct
  source 1..30: mol_type = other DNA
aaagaaaaattagaggcgaccattaacgaa

SEQ ID NO: 1443 - DNA, 30 bp, synthetic construct
  source 1..30: mol_type = other DNA
gatgaacgtgttcaacagattaaaaagagc

SEQ ID NO: 1444 - DNA, 30 bp, synthetic construct
  source 1..30: mol_type = other DNA
cgtgatcagggtaaggaaatggcgaccaaa

SEQ ID NO: 1445 - DNA, 30 bp, synthetic construct
  source 1..30: mol_type = other DNA
ctgagcaccgaccgcaaaatggatgaagtg

SEQ ID NO: 1446 - DNA, 30 bp, synthetic construct
  source 1..30: mol_type = other DNA
gtggaagatttaacgagcaaagcggagaaa

SEQ ID NO: 1447 - DNA, 30 bp, synthetic construct
  source 1..30: mol_type = other DNA
gaagataaattacgcaccattgcgaacgaa

SEQ ID NO: 1448 - DNA, 30 bp, synthetic construct
  source 1..30: mol_type = other DNA
cgtgaaaaattattagataccatgaatcgt

SEQ ID NO: 1449 - DNA, 30 bp, synthetic construct
  source 1..30: mol_type = other DNA
aatcataatttagagcgtattcgtgagctg

SEQ ID NO: 1450 - DNA, 30 bp, synthetic construct
  source 1..30: mol_type = other DNA
gataaaagccgcaagctgctggaatctatt

SEQ ID NO: 1451 - DNA, 30 bp, synthetic construct
  source 1..30: mol_type = other DNA
aaaaatgatatcgttgaactgaaaaacaaa

SEQ ID NO: 1452 - DNA, 30 bp, synthetic construct
  source 1..30: mol_type = other DNA
cataccgattctcacctgcatacccgccag

SEQ ID NO: 1453 - DNA, 30 bp, synthetic construct
  source 1..30: mol_type = other DNA
cagcgtctgcgcacgaaactggaaacggaa

SEQ ID NO: 1454 - DNA, 30 bp, synthetic construct
  source 1..30: mol_type = other DNA
gaacgtacccgcgccgatattaaatctgtg

SEQ ID NO: 1455 - DNA, 30 bp, synthetic construct
  source 1..30: mol_type = other DNA
ccgcatgtgacggagcgtgtgcagaaggaa

SEQ ID NO: 1456 - DNA, 30 bp, synthetic construct
  source 1..30: mol_type = other DNA
gataataaattaaacgaaattggcgagaaa

SEQ ID NO: 1457 - DNA, 30 bp, synthetic construct
  source 1..30: mol_type = other DNA
aaaccgaaagccgaccagaaactggagcag

SEQ ID NO: 1458 - DNA, 30 bp, synthetic construct
  source 1..30: mol_type = other DNA
agcgcgaaaaagaaggatgtgatttctgaa

SEQ ID NO: 1459 - DNA, 30 bp, synthetic construct
  source 1..30: mol_type = other DNA
attaatgaagttaagcagcatctggagcgt

SEQ ID NO: 1460 - DNA, 30 bp, synthetic construct
  source 1..30: mol_type = other DNA
aaaaaagaagttgaccaggcgattaagagc

SEQ ID NO: 1461 - DNA, 30 bp, synthetic construct
  source 1..30: mol_type = other DNA
gcgaccgatacgcaccgtctgcataaggaa

SEQ ID NO: 1462 - DNA, 30 bp, synthetic construct
  source 1..30: mol_type = other DNA
catgcggaacgcttaaaagtgcagaagaat

SEQ ID NO: 1463 - DNA, 30 bp, synthetic construct
  source 1..30: mol_type = other DNA
accaaaattcgcgagaaagtgcgttctgat

SEQ ID NO: 1464 - DNA, 30 bp, synthetic construct
  source 1..30: mol_type = other DNA
gcggatgatgttaagcagctgaaatctaaa

SEQ ID NO: 1465 - DNA, 30 bp, synthetic construct
  source 1..30: mol_type = other DNA
ctgcatcaggttcgcaaaaaactggacagc

SEQ ID NO: 1466 - DNA, 30 bp, synthetic construct
  source 1..30: mol_type = other DNA
gaagtggaagttcgccaggcgcgtgacaat

SEQ ID NO: 1467 - DNA, 30 bp, synthetic construct
  source 1..30: mol_type = other DNA
catgaaaaacacacgaccgcgctggagaaa

SEQ ID NO: 1468 - DNA, 30 bp, synthetic construct
  source 1..30: mol_type = other DNA
aaagaagatgttcaagcgagcctggagcgt

SEQ ID NO: 1469 - DNA, 30 bp, synthetic construct
  source 1..30: mol_type = other DNA
gaacatattaaggacgtgctgaaatctaat

SEQ ID NO: 1470 - DNA, 30 bp, synthetic construct
  source 1..30: mol_type = other DNA
aaagatgaattaatccgtaataatcaagaa

SEQ ID NO: 1471 - DNA, 30 bp, synthetic construct
  source 1..30: mol_type = other DNA
ctgaatacccgcttacgtaaactggacgaa

SEQ ID NO: 1472 - DNA, 30 bp, synthetic construct
  source 1..30: mol_type = other DNA
aaagataccatcaacaaaattcgtgacctg

SEQ ID NO: 1473 - DNA, 30 bp, synthetic construct
  source 1..30: mol_type = other DNA
gaaatgcgtgacttagtgcagcgtgagacc

SEQ ID NO: 1474 - DNA, 30 bp, synthetic construct
  source 1..30: mol_type = other DNA
aatcgtgaagttttagaacaggtggagcgt

SEQ ID NO: 1475 - DNA, 30 bp, synthetic construct
  source 1..30: mol_type = other DNA
aatcgtgaagttttagatcaggtggagcgt

SEQ ID NO: 1476 - DNA, 30 bp, synthetic construct
  source 1..30: mol_type = other DNA
agcgataaagcccacaaagtgctgaagcag

SEQ ID NO: 1477 - DNA, 30 bp, synthetic construct
  source 1..30: mol_type = other DNA
gaagcgcagacgcgcgaactgcgtttaaaa

SEQ ID NO: 1478 - DNA, 30 bp, synthetic construct
  source 1..30: mol_type = other DNA
ccggaaaccttaaaggaaaatctggacaaa

SEQ ID NO: 1479 - DNA, 30 bp, synthetic construct
  source 1..30: mol_type = other DNA
gaaaccaccgccgagcgtattaaaaaggaa

SEQ ID NO: 1480 - DNA, 30 bp, synthetic construct
  source 1..30: mol_type = other DNA
ctggatgatttaaagacccgtgtggagagc

SEQ ID NO: 1481 - DNA, 30 bp, synthetic construct
  source 1..30: mol_type = other DNA
aaagaacatttaaacgaaattcgtaagaat

SEQ ID NO: 1482 - DNA, 30 bp, synthetic construct
  source 1..30: mol_type = other DNA
ggccaggaattagagcgtcagctgaaggaa

SEQ ID NO: 1483 - DNA, 30 bp, synthetic construct
  source 1..30: mol_type = other DNA
gataaagtgatccaacagattaaaaaggat

SEQ ID NO: 1484 - DNA, 30 bp, synthetic construct
  source 1..30: mol_type = other DNA
cgtgatgaacgcaagaaaagcctgttaagc

SEQ ID NO: 1485 - DNA, 30 bp, synthetic construct
  source 1..30: mol_type = other DNA
catgaaacccgcgagctgacccgtatgaat

SEQ ID NO: 1486 - DNA, 30 bp, synthetic construct
  source 1..30: mol_type = other DNA
cagccgaccatccgcgaaaaagtgcgcgaa

SEQ ID NO: 1487 - DNA, 30 bp, synthetic construct
  source 1..30: mol_type = other DNA
gaaaataccgttaagaaactgcgtgaggcg

SEQ ID NO: 1488 - DNA, 33 bp, synthetic construct
  source 1..33: mol_type = other DNA
agcctgatgcgtgagaagattcgtaatgagagc

SEQ ID NO: 1489 - DNA, 33 bp, synthetic construct
  source 1..33: mol_type = other DNA
gaaccgatgctgaagaactttgaaaaagacacc

SEQ ID NO: 1490 - DNA, 33 bp, synthetic construct
  source 1..33: mol_type = other DNA
gaatgggaacaattaaccgtggaattacgcaaa

SEQ ID NO: 1491 - DNA, 33 bp, synthetic construct
  source 1..33: mol_type = other DNA
ggccagaaagacttaatggatcgtctgaacgaa

SEQ ID NO: 1492 - DNA, 33 bp, synthetic construct
  source 1..33: mol_type = other DNA
accaaaaccttccacgaagcgattcgcgacaaa

SEQ ID NO: 1493 - DNA, 33 bp, synthetic construct
  source 1..33: mol_type = other DNA
aaaggcaaaatcacggattttctgtctgagcat

SEQ ID NO: 1494 - DNA, 33 bp, synthetic construct
  source 1..33: mol_type = other DNA
cagaaacgtgttgacaaaatttttgaccaaatg

SEQ ID NO: 1495 - DNA, 33 bp, synthetic construct
  source 1..33: mol_type = other DNA
attaatcatacgaaggatattctgaagaagttt

SEQ ID NO: 1496 - DNA, 33 bp, synthetic construct
  source 1..33: mol_type = other DNA
gatgaacagcgcaagctgctgaaagaggcccag

SEQ ID NO: 1497 - DNA, 33 bp, synthetic construct
  source 1..33: mol_type = other DNA
aaaagcattgccgaggatattattaagaagaat

SEQ ID NO: 1498 - DNA, 33 bp, synthetic construct
  source 1..33: mol_type = other DNA
gcggaaaaaatcaagcaggaagtggacgccagc

SEQ ID NO: 1499 - DNA, 33 bp, synthetic construct
  source 1..33: mol_type = other DNA
tataaagaagacatcaaaattatgaaacaaacc

SEQ ID NO: 1500 - DNA, 33 bp, synthetic construct
  source 1..33: mol_type = other DNA
agcgatgatgttcgccatgcggtgcaacgcgtg

SEQ ID NO: 1501 - DNA, 33 bp, synthetic construct
  source 1..33: mol_type = other DNA
catagcaaataccgcgaagaagcgatgcaaaat

SEQ ID NO: 1502 - DNA, 33 bp, synthetic construct
  source 1..33: mol_type = other DNA
agctatgatacgggtaaagaaattatcaaggaa

SEQ ID NO: 1503 - DNA, 33 bp, synthetic construct
  source 1..33: mol_type = other DNA
ctgaataataaggttgatgaactgaagaagagc

SEQ ID NO: 1504 - DNA, 33 bp, synthetic construct
  source 1..33: mol_type = other DNA
tgggaagcgttacgcgaaagcattaagacgcat

SEQ ID NO: 1505 - DNA, 33 bp, synthetic construct
  source 1..33: mol_type = other DNA
catagcctggttaaggcgaaactgcgcgagacc

SEQ ID NO: 1506 - DNA, 33 bp, synthetic construct
  source 1..33: mol_type = other DNA
gaaaatgataaggagcagctgaaagccatcagc

SEQ ID NO: 1507 - DNA, 33 bp, synthetic construct
  source 1..33: mol_type = other DNA
agcattggcgaccgcatgaaacgttatgagaat

SEQ ID NO: 1508 - DNA, 33 bp, synthetic construct
  source 1..33: mol_type = other DNA
cgtgataaagttaacgatattgtggaccaagtg

SEQ ID NO: 1509 - DNA, 33 bp, synthetic construct
  source 1..33: mol_type = other DNA
gataccgtgtacaagaaactggtgcaacgcgaa

SEQ ID NO: 1510 - DNA, 33 bp, synthetic construct
  source 1..33: mol_type = other DNA
agcgaaaaagttgttcaggaagcgttagacaaa

SEQ ID NO: 1511 - DNA, 33 bp, synthetic construct
  source 1..33: mol_type = other DNA
gaaaaaaccttatctgcggtgaaagagaagatt

SEQ ID NO: 1512 - DNA, 33 bp, synthetic construct
  source 1..33: mol_type = other DNA
cgtgatcagttagttggcaaaattcaagagcgt

SEQ ID NO: 1513 - DNA, 33 bp, synthetic construct
  source 1..33: mol_type = other DNA
catgatgaacaaacggcgattaaaaacaagctg

SEQ ID NO: 1514 - DNA, 33 bp, synthetic construct
  source 1..33: mol_type = other DNA
ccgaatgatttaaagcatgtgaaaaagttaagc

SEQ ID NO: 1515 - DNA, 33 bp, synthetic construct
  source 1..33: mol_type = other DNA
gatgatcgtttaaacaaagtgatttctgagctg

SEQ ID NO: 1516 - DNA, 33 bp, synthetic construct
  source 1..33: mol_type = other DNA
aaaaaactgttaacgtggcgtgaagaaacgggc

SEQ ID NO: 1517 - DNA, 33 bp, synthetic construct
  source 1..33: mol_type = other DNA
gtgagcgaaaaggagcatgcgacccgcttactg

SEQ ID NO: 1518 - DNA, 33 bp, synthetic construct
  source 1..33: mol_type = other DNA
accaatcgtgactacctggcggaacgcttacgt

SEQ ID NO: 1519 - DNA, 33 bp, synthetic construct
  source 1..33: mol_type = other DNA
attcatcgttacgttaatgaaatgaataaggaa

SEQ ID NO: 1520 - DNA, 33 bp, synthetic construct
  source 1..33: mol_type = other DNA
aatgatcgtaagtcttttctgctgcgcgacagc

SEQ ID NO: 1521 - DNA, 33 bp, synthetic construct
  source 1..33: mol_type = other DNA
ctggatgcggcccgcgaaaatgcgcgcaagaat

SEQ ID NO: 1522 - DNA, 33 bp, synthetic construct
  source 1..33: mol_type = other DNA
gaaaaaattcaaaaggaagcgcaggaggccctg

SEQ ID NO: 1523 - DNA, 33 bp, synthetic construct
  source 1..33: mol_type = other DNA
gatattgcgcgcaaggaacagctgaagtctctg

SEQ ID NO: 1524 - DNA, 33 bp, synthetic construct
  source 1..33: mol_type = other DNA
tggagccatacggagcgtctgctgaaggagcat

SEQ ID NO: 1525 - DNA, 33 bp, synthetic construct
  source 1..33: mol_type = other DNA
aaagatagcgccgcccgtgcgaaatctgacctg

SEQ ID NO: 1526 - DNA, 33 bp, synthetic construct
  source 1..33: mol_type = other DNA
aaagaaaccgagaacaaaattattaaggactat

SEQ ID NO: 1527 - DNA, 33 bp, synthetic construct
  source 1..33: mol_type = other DNA
aaagataccttacgcgaaaccattaagttcatg

SEQ ID NO: 1528 - DNA, 33 bp, synthetic construct
  source 1..33: mol_type = other DNA
tttaataccatcttaaaagaaattaaggagcgt

SEQ ID NO: 1529 - DNA, 33 bp, synthetic construct
  source 1..33: mol_type = other DNA
agcgcgcaggttgaccgtctgcgtgaggagttt

SEQ ID NO: 1530 - DNA, 33 bp, synthetic construct
  source 1..33: mol_type = other DNA
aaagcggaaacgaagaaactgattgacttaacc

SEQ ID NO: 1531 - DNA, 33 bp, synthetic construct
  source 1..33: mol_type = other DNA
agcaaagaacgcatcccggaaaccgttaagaaa

SEQ ID NO: 1532 - DNA, 33 bp, synthetic construct
  source 1..33: mol_type = other DNA
aaacaggaacgcacgctgtttaaagagttaatt

SEQ ID NO: 1533 - DNA, 33 bp, synthetic construct
  source 1..33: mol_type = other DNA
gaaaaaagcaagacggcgtttaaagaggcccag

SEQ ID NO: 1534 - DNA, 33 bp, synthetic construct
  source 1..33: mol_type = other DNA
ctgagcgaagccttaaaagaagcgacgaaggaa

SEQ ID NO: 1535 - DNA, 33 bp, synthetic construct
  source 1..33: mol_type = other DNA
gaaaccaaaatcttcgaagcggtgaagcaagaa

SEQ ID NO: 1536 - DNA, 33 bp, synthetic construct
  source 1..33: mol_type = other DNA
gaagaacaggttacgaaactgctgcaccgcaaa

SEQ ID NO: 1537 - DNA, 33 bp, synthetic construct
  source 1..33: mol_type = other DNA
cgtaccgatttaaaggattatattacgaagaat

SEQ ID NO: 1538 - DNA, 33 bp, synthetic construct
  source 1..33: mol_type = other DNA
accctgctggagaagaccctgaaagagcgcctg

SEQ ID NO: 1539 - DNA, 33 bp, synthetic construct
  source 1..33: mol_type = other DNA
aaagaagcgttagccagccgttttaaggagacc

SEQ ID NO: 1540 - DNA, 33 bp, synthetic construct
  source 1..33: mol_type = other DNA
gaaaatcagtctaagaaactgaaagagttaatg

SEQ ID NO: 1541 - DNA, 33 bp, synthetic construct
  source 1..33: mol_type = other DNA
ctggaaaaagttaagaattggcagaaagacgcg

SEQ ID NO: 1542 - DNA, 33 bp, synthetic construct
  source 1..33: mol_type = other DNA
gcgaaaaaacaaatcaatgattatgttgagaaa

SEQ ID NO: 1543 - DNA, 33 bp, synthetic construct
  source 1..33: mol_type = other DNA
agcagcctgaaggacattgatattgcccgcgaa

SEQ ID NO: 1544 - DNA, 33 bp, synthetic construct
  source 1..33: mol_type = other DNA
gaagaagcgcgcacgcgtaaatttcaagccatg

SEQ ID NO: 1545 - DNA, 33 bp, synthetic construct
  source 1..33: mol_type = other DNA
ggcgaagatacgtgggaggcgattaaacaaaaa

SEQ ID NO: 1546 - DNA, 33 bp, synthetic construct
  source 1..33: mol_type = other DNA
catcatacccgcgttcgtgtgtatcaagagatt

SEQ ID NO: 1547 - DNA, 33 bp, synthetic construct
  source 1..33: mol_type = other DNA
gatgcgcgtaagaaggatctgaaatctatccag

SEQ ID NO: 1548 - DNA, 33 bp, synthetic construct
  source 1..33: mol_type = other DNA
gatgaaaaagccgagcatctgcagaagacgtat

SEQ ID NO: 1549 - DNA, 33 bp, synthetic construct
  source 1..33: mol_type = other DNA
aaagaatttcaaaaggaaagcctgtctatggat

SEQ ID NO: 1550 - DNA, 33 bp, synthetic construct
  source 1..33: mol_type = other DNA
ccgaaagaagccgagcagtttgtgaaggagagc

SEQ ID NO: 1551 - DNA, 33 bp, synthetic construct
  source 1..33: mol_type = other DNA
cgtgaagaattcacgaaaaaagtgcgcacgaat

SEQ ID NO: 1552 - DNA, 33 bp, synthetic construct
  source 1..33: mol_type = other DNA
gaacgtgcgaacgagctggtggaatcttaccgt

SEQ ID NO: 1553 - DNA, 33 bp, synthetic construct
  source 1..33: mol_type = other DNA
gcgagcgatgttgaggaacgtgtgcaaaagagc

SEQ ID NO: 1554 - DNA, 33 bp, synthetic construct
  source 1..33: mol_type = other DNA
cgtgaaaatgccttactggaactgtctaagaaa

SEQ ID NO: 1555 - DNA, 33 bp, synthetic construct
  source 1..33: mol_type = other DNA
gtggaagaagccaagaatcgtgcggaccaatgg

SEQ ID NO: 1556 - DNA, 33 bp, synthetic construct
  source 1..33: mol_type = other DNA
ctggaagaatgggttgagaaagcgaaatctagc

SEQ ID NO: 1557 - DNA, 33 bp, synthetic construct
  source 1..33: mol_type = other DNA
atgacccagaaggttgaagaactgaaggagacc

SEQ ID NO: 1558 - DNA, 33 bp, synthetic construct
  source 1..33: mol_type = other DNA
gaaaatagcaagaagacccaggaattagttgaa

SEQ ID NO: 1559 - DNA, 33 bp, synthetic construct
  source 1..33: mol_type = other DNA
gaaaccaccgccgagcgtattaaaaaggagatt

SEQ ID NO: 1560 - DNA, 33 bp, synthetic construct
  source 1..33: mol_type = other DNA
accgatcagatgcgcgaggcggtgaaacgcgtg

SEQ ID NO: 1561 - DNA, 33 bp, synthetic construct
  source 1..33: mol_type = other DNA
aatcatgatgttaagctgctgcgtaagttaaat

SEQ ID NO: 1562 - DNA, 33 bp, synthetic construct
  source 1..33: mol_type = other DNA
tttgcgaccaagttacgtgaaaaattagagagc

SEQ ID NO: 1563 - DNA, 33 bp, synthetic construct
  source 1..33: mol_type = other DNA
gaaaaaggcaagcgcattcgtgaaaactacagc

SEQ ID NO: 1564 - DNA, 33 bp, synthetic construct
  source 1..33: mol_type = other DNA
catgatcaggccgttcgtacctatcaagagcat

SEQ ID NO: 1565 - DNA, 33 bp, synthetic construct
  source 1..33: mol_type = other DNA
aaagaaaatttattagattttattaagcacaat

SEQ ID NO: 1566 - DNA, 33 bp, synthetic construct
  source 1..33: mol_type = other DNA
atggaaagcacgttcgaacgtattaaggagctg

SEQ ID NO: 1567 - DNA, 33 bp, synthetic construct
  source 1..33: mol_type = other DNA
aaagatcaggcccgccaggcgctggacaagctg

SEQ ID NO: 1568 - DNA, 33 bp, synthetic construct
  source 1..33: mol_type = other DNA
agcaaagatatggagtctcatgtgtttttaaaa

SEQ ID NO: 1569 - DNA, 33 bp, synthetic construct
  source 1..33: mol_type = other DNA
gtgaaagatgccatgcaacatctggatcgccag

SEQ ID NO: 1570 - DNA, 33 bp, synthetic construct
  source 1..33: mol_type = other DNA
gtggatcgtttaaaggataaagtgaacaacacc

SEQ ID NO: 1571 - DNA, 33 bp, synthetic construct
  source 1..33: mol_type = other DNA
aatcgtgatgttgagcgtattgcggagttaagc

SEQ ID NO: 1572 - DNA, 33 bp, synthetic construct
  source 1..33: mol_type = other DNA
gatcaggtgtgggacgagattgtgaaaaagaat

SEQ ID NO: 1573 - DNA, 33 bp, synthetic construct
  source 1..33: mol_type = other DNA
catgatgcgttaatccagctgcatgagcaacgt

SEQ ID NO: 1574 - DNA, 33 bp, synthetic construct
  source 1..33: mol_type = other DNA
aaagaaaaattagaggcgaccattaacgagctg

SEQ ID NO: 1575 - DNA, 33 bp, synthetic construct
  source 1..33: mol_type = other DNA
caggcggaattagaccgtctgcgtgttgagacc

SEQ ID NO: 1576 - DNA, 33 bp, synthetic construct
  source 1..33: mol_type = other DNA
catgcgatttctacggaaaaaattaaggccaaa

SEQ ID NO: 1577 - DNA, 33 bp, synthetic construct
  source 1..33: mol_type = other DNA
caggtgaaagccaagcatctgaaagactctatg

SEQ ID NO: 1578 - DNA, 33 bp, synthetic construct
  source 1..33: mol_type = other DNA
catagcaaattagccgaaagcgtggagaaggcg

SEQ ID NO: 1579 - DNA, 33 bp, synthetic construct
  source 1..33: mol_type = other DNA
agctatgatcgcttaatgaaaaccattaaggaa

SEQ ID NO: 1580 - DNA, 33 bp, synthetic construct
  source 1..33: mol_type = other DNA
gaaaccgatcacttcgatattaaaaacttaaaa

SEQ ID NO: 1581 - DNA, 33 bp, synthetic construct
  source 1..33: mol_type = other DNA
aatggcaaagccgccgatcgtattcaccaagat

SEQ ID NO: 1582 - DNA, 33 bp, synthetic construct
  source 1..33: mol_type = other DNA
agcgatgatatccgcaaactgctggagtctcag

SEQ ID NO: 1583 - DNA, 33 bp, synthetic construct
  source 1..33: mol_type = other DNA
aaaacccagatgcaagagaaagcgaaagagatt

SEQ ID NO: 1584 - DNA, 33 bp, synthetic construct
  source 1..33: mol_type = other DNA
gcggataccatcaagaaactgaccgacaagatt

SEQ ID NO: 1585 - DNA, 33 bp, synthetic construct
  source 1..33: mol_type = other DNA
ccggataaaacggttaaaaaagtgcaagacaaa

SEQ ID NO: 1586 - DNA, 33 bp, synthetic construct
  source 1..33: mol_type = other DNA
accctgaaacaagagtatgaacgtgaccgcgat

SEQ ID NO: 1587 - DNA, 33 bp, synthetic construct
  source 1..33: mol_type = other DNA
cgtcagaaagagttagaacagcgtaagttaacc

SEQ ID NO: 1588 - DNA, 33 bp, synthetic construct
  source 1..33: mol_type = other DNA
caggcggaattaaaggaactgctgcaaaaggaa

SEQ ID NO: 1589 - DNA, 33 bp, synthetic construct
  source 1..33: mol_type = other DNA
agcgataaaatcaagaaatttctgacggagagc

SEQ ID NO: 1590 - DNA, 33 bp, synthetic construct
  source 1..33: mol_type = other DNA
aaaagcgatatggagaagctggcgaaagccacc

SEQ ID NO: 1591 - DNA, 33 bp, synthetic construct
  source 1..33: mol_type = other DNA
attaaaaaattaaaggaaaatattgcccaacat

SEQ ID NO: 1592 - DNA, 33 bp, synthetic construct
  source 1..33: mol_type = other DNA
agcagccatttaaaggcgcatctgcgcacgcat

SEQ ID NO: 1593 - DNA, 33 bp, synthetic construct
  source 1..33: mol_type = other DNA
gaactgaaatctaagctgctggatttccgcaat

SEQ ID NO: 1594 - DNA, 33 bp, synthetic construct
  source 1..33: mol_type = other DNA
gtggattttttaacggatcagcgtttacgcgaa

SEQ ID NO: 1595 - DNA, 33 bp, synthetic construct
  source 1..33: mol_type = other DNA
agcgaacgtggtcgccagctggcggaccacctg

SEQ ID NO: 1596 - DNA, 33 bp, synthetic construct
  source 1..33: mol_type = other DNA
cgtattagcgacaagtttaccgaattaaaggaa

SEQ ID NO: 1597 - DNA, 33 bp, synthetic construct
  source 1..33: mol_type = other DNA
gatcgtctgatcaagagccatattaagacgaat

SEQ ID NO: 1598 - DNA, 33 bp, synthetic construct
  source 1..33: mol_type = other DNA
ctgaaaaattgggttcgcgaactgcgtcaacat

SEQ ID NO: 1599 - DNA, 33 bp, synthetic construct
  source 1..33: mol_type = other DNA
aaagcgcatttagcccagcatcagaagacgcat

SEQ ID NO: 1600 - DNA, 33 bp, synthetic construct
  source 1..33: mol_type = other DNA
gataaagcggacttagatggccagttaacgaaa

SEQ ID NO: 1601 - DNA, 33 bp, synthetic construct
  source 1..33: mol_type = other DNA
accgatgataaggagaaactgctgaagacgctg

SEQ ID NO: 1602 - DNA, 33 bp, synthetic construct
  source 1..33: mol_type = other DNA
aaaagcgaattaaaggaactgattaacaacgaa

SEQ ID NO: 1603 - DNA, 33 bp, synthetic construct
  source 1..33: mol_type = other DNA
attcatcgttacatccaggaaatgaatcgcaaa

SEQ ID NO: 1604 - DNA, 33 bp, synthetic construct
  source 1..33: mol_type = other DNA
ccggaacaggttgagcgtctgaccaaggagttt

SEQ ID NO: 1605 - DNA, 33 bp, synthetic construct
  source 1..33: mol_type = other DNA
agcagccatttaaaggcgcatacccgcacgcat

SEQ ID NO: 1606 - DNA, 33 bp, synthetic construct
  source 1..33: mol_type = other DNA
gatgaacaggttttagaaaaagtggcccgccag

SEQ ID NO: 1607 - DNA, 33 bp, synthetic construct
  source 1..33: mol_type = other DNA
aaaagcgaattaaaggaactgctgacgcgcgaa

SEQ ID NO: 1608 - DNA, 33 bp, synthetic construct
  source 1..33: mol_type = other DNA
aaaaatcagaaggacgtgctgaaagagttactg

SEQ ID NO: 1609 - DNA, 33 bp, synthetic construct
  source 1..33: mol_type = other DNA
ggcctggaagacaaggtgagcaaacaattagaa

SEQ ID NO: 1610 - DNA, 33 bp, synthetic construct
  source 1..33: mol_type = other DNA
gaacgtaaagagatggccaccattctgtctaaa

SEQ ID NO: 1611 - DNA, 33 bp, synthetic construct
  source 1..33: mol_type = other DNA
agcgaagatcgcttagtgaatgaaaagttccgt

SEQ ID NO: 1612 - DNA, 33 bp, synthetic construct
  source 1..33: mol_type = other DNA
cgtgaacagtacgagaaaatgcagaaagacggc

SEQ ID NO: 1613 - DNA, 33 bp, synthetic construct
  source 1..33: mol_type = other DNA
gaaaaaaaattaatcaccgatgcgttaaacaaa

SEQ ID NO: 1614 - DNA, 33 bp, synthetic construct
  source 1..33: mol_type = other DNA
aaaaccgaaatcaacgaagcgctgaagaagatt

SEQ ID NO: 1615 - DNA, 33 bp, synthetic construct
  source 1..33: mol_type = other DNA
cgtcagctggagtggggtctggaacgtacgcgt

SEQ ID NO: 1616 - DNA, 33 bp, synthetic construct
  source 1..33: mol_type = other DNA
accgcgcatcgcttacagctgcatgacgagcat

SEQ ID NO: 1617 - DNA, 33 bp, synthetic construct
  source 1..33: mol_type = other DNA
gataaagatttaacgcagctgaaaaaggaggcg

SEQ ID NO: 1618 - DNA, 33 bp, synthetic construct
  source 1..33: mol_type = other DNA
gattttcatcacgagacccgtgtgacgttaacc

SEQ ID NO: 1619 - DNA, 33 bp, synthetic construct
  source 1..33: mol_type = other DNA
gatgatgcggccaagaaactgcagcgctacacc

SEQ ID NO: 1620 - DNA, 33 bp, synthetic construct
  source 1..33: mol_type = other DNA
gcgagcctggttaaggaactgcgtgagcgcacc

SEQ ID NO: 1621 - DNA, 33 bp, synthetic construct
  source 1..33: mol_type = other DNA
accaccattcaccgcattaaacagaaggagttt

SEQ ID NO: 1622 - DNA, 33 bp, synthetic construct
  source 1..33: mol_type = other DNA
ctgccgcgtgttatgaaggatagcaaaaacgaa

SEQ ID NO: 1623 - DNA, 33 bp, synthetic construct
  source 1..33: mol_type = other DNA
gcgcatgatcgcatcctgaaaaccatcaagacc

SEQ ID NO: 1624 - DNA, 33 bp, synthetic construct
  source 1..33: mol_type = other DNA
ctggaagatgtttctaattttctgaaggagcgt

SEQ ID NO: 1625 - DNA, 33 bp, synthetic construct
  source 1..33: mol_type = other DNA
gaagataaattacgcaccattgcgaacgagaat

SEQ ID NO: 1626 - DNA, 33 bp, synthetic construct
  source 1..33: mol_type = other DNA
gtggataaaatccgcaatcagtatcgcgaggat

SEQ ID NO: 1627 - DNA, 33 bp, synthetic construct
  source 1..33: mol_type = other DNA
gaaaaagaattatctctgctgcgtaaccgcaaa

SEQ ID NO: 1628 - DNA, 33 bp, synthetic construct
  source 1..33: mol_type = other DNA
aatgaaaaataccaaattctggcgcgcgaccat

SEQ ID NO: 1629 - DNA, 33 bp, synthetic construct
  source 1..33: mol_type = other DNA
gcgaatgatttattaagcaaagtgaagaaggat

SEQ ID NO: 1630 - DNA, 33 bp, synthetic construct
  source 1..33: mol_type = other DNA
catagcattatcaagggcattaaagaccgcacc

SEQ ID NO: 1631 - DNA, 33 bp, synthetic construct
  source 1..33: mol_type = other DNA
ccgcgtgaacaattaatggaaagcattcgcaaa

SEQ ID NO: 1632 - DNA, 33 bp, synthetic construct
  source 1..33: mol_type = other DNA
gaaacccaggccaaggaactggcggcccacaaa

SEQ ID NO: 1633 - DNA, 33 bp, synthetic construct
  source 1..33: mol_type = other DNA
cgtgaaaaattattagataccatgaatcgcctg

SEQ ID NO: 1634 - DNA, 33 bp, synthetic construct
  source 1..33: mol_type = other DNA
gatgattttcaacaaaaaattgaaaagatcaaa

SEQ ID NO: 1635 - DNA, 33 bp, synthetic construct
  source 1..33: mol_type = other DNA
cgtgtgcatacgtctgaactgaaattacgcgcg

SEQ ID NO: 1636 - DNA, 33 bp, synthetic construct
  source 1..33: mol_type = other DNA
gaaaccaaattacgcgaaaccattacgcgccat

SEQ ID NO: 1637 - DNA, 33 bp, synthetic construct
  source 1..33: mol_type = other DNA
attagcgatttacaccagaccctgaagaaggaa

SEQ ID NO: 1638 - DNA, 33 bp, synthetic construct
  source 1..33: mol_type = other DNA
cagcatgaacgcttaggcaccctggttcgcgaa

SEQ ID NO: 1639 - DNA, 33 bp, synthetic construct
  source 1..33: mol_type = other DNA
gatgaatttgacgcccagatgaccaaagccaaa

SEQ ID NO: 1640 - DNA, 33 bp, synthetic construct
  source 1..33: mol_type = other DNA
gtgcatgaaaagtggcaaaaagcgattcaaaaa

SEQ ID NO: 1641 - DNA, 33 bp, synthetic construct
  source 1..33: mol_type = other DNA
gatgcgaaaatcttaaatgatgtgcaagaccgt

SEQ ID NO: 1642 - DNA, 33 bp, synthetic construct
  source 1..33: mol_type = other DNA
aaaagcgatatggacaagctggcgaaagccacc

SEQ ID NO: 1643 - DNA, 33 bp, synthetic construct
  source 1..33: mol_type = other DNA
catgtgaaagagacggcgctgaaagagttaaat

SEQ ID NO: 1644 - DNA, 33 bp, synthetic construct
  source 1..33: mol_type = other DNA
ctgcgtagccacgacaattttaaagccaagctg

SEQ ID NO: 1645 - DNA, 33 bp, synthetic construct
  source 1..33: mol_type = other DNA
gaaattacccgcttagtggaaaccttcaagaaa

SEQ ID NO: 1646 - DNA, 33 bp, synthetic construct
  source 1..33: mol_type = other DNA
catagcaccttagagtataaagtgaaggagcgt

SEQ ID NO: 1647 - DNA, 33 bp, synthetic construct
  source 1..33: mol_type = other DNA
attcatcagtaccgcgaacagattaagcgcgtg

SEQ ID NO: 1648 - DNA, 33 bp, synthetic construct
  source 1..33: mol_type = other DNA
cgtgatctggaccgccagaaacagaagttagaa

SEQ ID NO: 1649 - DNA, 33 bp, synthetic construct
  source 1..33: mol_type = other DNA
aaagcggatatcgttcgtcagctgtctgagcgt

SEQ ID NO: 1650 - DNA, 33 bp, synthetic construct
  source 1..33: mol_type = other DNA
aaaaaagcgtgggagaacatggtgaccaaagat

SEQ ID NO: 1651 - DNA, 33 bp, synthetic construct
  source 1..33: mol_type = other DNA
cataaatttatcgacaccattaccgaccacatg

SEQ ID NO: 1652 - DNA, 33 bp, synthetic construct
  source 1..33: mol_type = other DNA
ccgaatgatttaaagcattataaaaagttaagc

SEQ ID NO: 1653 - DNA, 33 bp, synthetic construct
  source 1..33: mol_type = other DNA
cgtgatcagggtaaggaaatggcgaccaagtat

SEQ ID NO: 1654 - DNA, 33 bp, synthetic construct
  source 1..33: mol_type = other DNA
aaaggcgaattaaagcagctgctgacgaaggaa

SEQ ID NO: 1655 - DNA, 33 bp, synthetic construct
  source 1..33: mol_type = other DNA
ccgaatgatttaaagcatctgaaaaagttaagc

SEQ ID NO: 1656 - DNA, 33 bp, synthetic construct
  source 1..33: mol_type = other DNA
gaactgaaagaccaactggaaaatttccgccgt

SEQ ID NO: 1657 - DNA, 33 bp, synthetic construct
  source 1..33: mol_type = other DNA
gtgcaggatttaacgcgtgaactgaacgagaaa

SEQ ID NO: 1658 - DNA, 33 bp, synthetic construct
  source 1..33: mol_type = other DNA
cgtaccagcatcgaccatctgaaagagatcgcg

SEQ ID NO: 1659 - DNA, 33 bp, synthetic construct
  source 1..33: mol_type = other DNA
aaagataaacaattagaaaccatggcgcgcctg

SEQ ID NO: 1660 - DNA, 33 bp, synthetic construct
  source 1..33: mol_type = other DNA
ctgagccgtgccaaggaatttgcgcaaaagcat

SEQ ID NO: 1661 - DNA, 33 bp, synthetic construct
  source 1..33: mol_type = other DNA
ctgaccgatttagttgaacattttaagaagacc

SEQ ID NO: 1662 - DNA, 33 bp, synthetic construct
  source 1..33: mol_type = other DNA
tttagcgaaaacttaaaaaaagcgaaggagaaa

SEQ ID NO: 1663 - DNA, 36 bp, synthetic construct
  source 1..36: mol_type = other DNA
gataaagatttagaggtgtggaatcgtttaacgagc

SEQ ID NO: 1664 - DNA, 36 bp, synthetic construct
  source 1..36: mol_type = other DNA
caggaacgtttagacgcgattgtgtctcgcacccgt

SEQ ID NO: 1665 - DNA, 36 bp, synthetic construct
  source 1..36: mol_type = other DNA
gtggatgaagttaagcgtcagattgacttagcgagc

SEQ ID NO: 1666 - DNA, 36 bp, synthetic construct
  source 1..36: mol_type = other DNA
cagaccaaaatcgacgcgaaaaaagagcaactggcg

SEQ ID NO: 1667 - DNA, 36 bp, synthetic construct
  source 1..36: mol_type = other DNA
gataatgatatccaagatattcgtaaccgcattttt

SEQ ID NO: 1668 - DNA, 36 bp, synthetic construct
  source 1..36: mol_type = other DNA
ctgagcgatttcaaggaactgctgcgcacggtgaaa

SEQ ID NO: 1669 - DNA, 36 bp, synthetic construct
  source 1..36: mol_type = other DNA
aaagaatgggaaaagaagattagcgaagccatccag

SEQ ID NO: 1670 - DNA, 36 bp, synthetic construct
  source 1..36: mol_type = other DNA
ggcgaacgtttcaaggaaaatattcgcaaggtgaat

SEQ ID NO: 1671 - DNA, 36 bp, synthetic construct
  source 1..36: mol_type = other DNA
gaacgtgcgcgcacggaatttatttcttctaaactg

SEQ ID NO: 1672 - DNA, 36 bp, synthetic construct
  source 1..36: mol_type = other DNA
gatattcatcaataccgtgaacagatcaagcgtgtg

SEQ ID NO: 1673 - DNA, 36 bp, synthetic construct
  source 1..36: mol_type = other DNA
ctggataccgactaccagatgaccaaacgcgacatg

SEQ ID NO: 1674 - DNA, 36 bp, synthetic construct
  source 1..36: mol_type = other DNA
attgataatgttaagagcaaaattcaagacaaagaa

SEQ ID NO: 1675 - DNA, 36 bp, synthetic construct
  source 1..36: mol_type = other DNA
aaagtgctggacgccattattcaggagaagaaaagc

SEQ ID NO: 1676 - DNA, 36 bp, synthetic construct
  source 1..36: mol_type = other DNA
aatgcgcaggttaaggatgtggaagagaagtatagc

SEQ ID NO: 1677 - DNA, 36 bp, synthetic construct
  source 1..36: mol_type = other DNA
catagccagttcatcaaactggtggccgagaaacgt

SEQ ID NO: 1678 - DNA, 36 bp, synthetic construct
  source 1..36: mol_type = other DNA
aaagatgtgttagacgaactgaaaaactacattagc

SEQ ID NO: 1679 - DNA, 36 bp, synthetic construct
  source 1..36: mol_type = other DNA
aaaaaaaccatcgccgcggaagatgttttaaatgat

SEQ ID NO: 1680 - DNA, 36 bp, synthetic construct
  source 1..36: mol_type = other DNA
gaagaagcgaagatcattaaacagtacgttaaaaat

SEQ ID NO: 1681 - DNA, 36 bp, synthetic construct
  source 1..36: mol_type = other DNA
gtgaccgcggttaaggatagctttgagcgccatctg

SEQ ID NO: 1682 - DNA, 36 bp, synthetic construct
  source 1..36: mol_type = other DNA
aaaggcacccaaggtgaacgtattgttgaggattat

SEQ ID NO: 1683 - DNA, 36 bp, synthetic construct
  source 1..36: mol_type = other DNA
ggcacccatacgaaggaactggatttatggaagagc

SEQ ID NO: 1684 - DNA, 36 bp, synthetic construct
  source 1..36: mol_type = other DNA
tatgatgaaatcaaggatgtggtgacgaagctgagc

SEQ ID NO: 1685 - DNA, 36 bp, synthetic construct
  source 1..36: mol_type = other DNA
caggaatatgttcgcgaaaccattgacaagctgatg

SEQ ID NO: 1686 - DNA, 36 bp, synthetic construct
  source 1..36: mol_type = other DNA
aaagatcatttagacctgctgagcaagtctgcgtat

SEQ ID NO: 1687 - DNA, 36 bp, synthetic construct
  source 1..36: mol_type = other DNA
aaagaaagcatcaagaaagcgctggagttaaccatg

SEQ ID NO: 1688 - DNA, 36 bp, synthetic construct
  source 1..36: mol_type = other DNA
gatggcctggaggttgcgaaaaccatccgcaaaacc

SEQ ID NO: 1689 - DNA, 36 bp, synthetic construct
  source 1..36: mol_type = other DNA
catgatagcatcaagatgtttattaaaaacgccaaa

SEQ ID NO: 1690 - DNA, 36 bp, synthetic construct
  source 1..36: mol_type = other DNA
tttaaaaatatcgacgatctgaataaggttctgaaa

SEQ ID NO: 1691 - DNA, 36 bp, synthetic construct
  source 1..36: mol_type = other DNA
ccgcaggatatccaagcgtttcgtgagttagataaa

SEQ ID NO: 1692 - DNA, 36 bp, synthetic construct
  source 1..36: mol_type = other DNA
ctgaaagaaaaggagaataatgattcttctgataaa

SEQ ID NO: 1693 - DNA, 36 bp, synthetic construct
  source 1..36: mol_type = other DNA
cgtgataaagttaacgatattgtggaccaagtgatt

SEQ ID NO: 1694 - DNA, 36 bp, synthetic construct
  source 1..36: mol_type = other DNA
cgtaaacagttcgagaaaaccatggaaacgtctagc

SEQ ID NO: 1695 - DNA, 36 bp, synthetic construct
  source 1..36: mol_type = other DNA
caggataaattagacaaaattattcaacgcacccgt

SEQ ID NO: 1696 - DNA, 36 bp, synthetic construct; identical to SEQ ID NO: 1169
  source 1..36: mol_type = other DNA

SEQ ID NO: 1697 - DNA, 36 bp, synthetic construct
  source 1..36: mol_type = other DNA
accaaagatttaaagaaactgatttggaacgagatt

SEQ ID NO: 1698 - DNA, 36 bp, synthetic construct
  source 1..36: mol_type = other DNA
accaaagaacgcgagcaggtgattgcccacctgggc

SEQ ID NO: 1699 - DNA, 36 bp, synthetic construct
  source 1..36: mol_type = other DNA
aatgaagaatgggacttactgattagcggtaagaaa

SEQ ID NO: 1700 - DNA, 36 bp, synthetic construct
  source 1..36: mol_type = other DNA
gaaaccaccgagcgcctgctgaaacaagccgtggaa

SEQ ID NO: 1701 - DNA, 36 bp, synthetic construct
  source 1..36: mol_type = other DNA
gatagcacccgccaacgtattgtggagttagcgcat

SEQ ID NO: 1702 - DNA, 36 bp, synthetic construct
  source 1..36: mol_type = other DNA
gatcgtgatacgttaaaaaatctgggtgaccgtctg

SEQ ID NO: 1703 - DNA, 36 bp, synthetic construct
  source 1..36: mol_type = other DNA
ctggcgcatttacgcgcgcatcagcgcacgcatacc

SEQ ID NO: 1704 - DNA, 36 bp, synthetic construct
  source 1..36: mol_type = other DNA
ctggcggaagtttctcagcgtcatgccgagaaactg

SEQ ID NO: 1705 - DNA, 36 bp, synthetic construct
  source 1..36: mol_type = other DNA
gcggcgagcttcttaacccgtatgaaagagaagcat

SEQ ID NO: 1706 - DNA, 36 bp, synthetic construct
  source 1..36: mol_type = other DNA
gcggatcgtgagaagcagattattacgcacctgaat

SEQ ID NO: 1707 - DNA, 36 bp, synthetic construct
  source 1..36: mol_type = other DNA
atggaaagcacgttcgaacgtattaaggagctgagc

SEQ ID NO: 1708 - DNA, 36 bp, synthetic construct
  source 1..36: mol_type = other DNA
gaactgcagcgcttatttcgtgatgcccacatgacc

SEQ ID NO: 1709 - DNA, 36 bp, synthetic construct
  source 1..36: mol_type = other DNA
gaacatcgtgccttacgtaaagtggtttctagcgcg

SEQ ID NO: 1710 - DNA, 36 bp, synthetic construct
  source 1..36: mol_type = other DNA
ggcgaacagcgcaagacctttgtggagttaatgcgt

SEQ ID NO: 1711 - DNA, 36 bp, synthetic construct
  source 1..36: mol_type = other DNA
agcgaaaaaatccaaaaagaagtggagtctctgatt

SEQ ID NO: 1712 - DNA, 36 bp, synthetic construct
  source 1..36: mol_type = other DNA
attagcaaagttcgcgaaatgcagaaatggttagaa

SEQ ID NO: 1713 - DNA, 36 bp, synthetic construct
  source 1..36: mol_type = other DNA
acccaggaacgcgaccgtctgattgacgactttcgt

SEQ ID NO: 1714 - DNA, 36 bp, synthetic construct
  source 1..36: mol_type = other DNA
gatgcgcagcgccaagcgaccaaagacgccggccgt

SEQ ID NO: 1715 - DNA, 36 bp, synthetic construct
  source 1..36: mol_type = other DNA
gaagatcgtatggagttatatcagacccgcttaagc

SEQ ID NO: 1716 - DNA, 36 bp, synthetic construct
  source 1..36: mol_type = other DNA
accagcgaattacgcgaagcgatgcgtaagttactg

SEQ ID NO: 1717 - DNA, 36 bp, synthetic construct
  source 1..36: mol_type = other DNA
accgtggaagcctacaaaaccattgcccgcgaagaa

SEQ ID NO: 1718 - DNA, 36 bp, synthetic construct
  source 1..36: mol_type = other DNA
aaagcgagcttaaactggcatatgaaaaaacacgat

SEQ ID NO: 1719 - DNA, 36 bp, synthetic construct
  source 1..36: mol_type = other DNA
gatgatgtgaagtctattgtgcgtttcgttcaggaa

SEQ ID NO: 1720 - DNA, 36 bp, synthetic construct
  source 1..36: mol_type = other DNA
ccgaccgtgcgcgagctgaaagaaacgttagaaaat

SEQ ID NO: 1721 - DNA, 36 bp, synthetic construct
  source 1..36: mol_type = other DNA
gaaaatgtgacggagctgaaaaaaaacttcaatcgt

SEQ ID NO: 1722 - DNA, 36 bp, synthetic construct
  source 1..36: mol_type = other DNA
cgtcatgatatcttaagcgcgtttgacacgcgtatt

SEQ ID NO: 1723 - DNA, 36 bp, synthetic construct
  source 1..36: mol_type = other DNA
accgatagccgcaacgtggatgattacgttcgtaaa

SEQ ID NO: 1724 - DNA, 36 bp, synthetic construct
  source 1..36: mol_type = other DNA
cgtgaaggctacgagaaactgaaacaagagctgaat

SEQ ID NO: 1725 - DNA, 36 bp, synthetic construct
  source 1..36: mol_type = other DNA
atttatcagcaagttcgtgatgaattaaagcgtgcg

SEQ ID NO: 1726 - DNA, 36 bp, synthetic construct
  source 1..36: mol_type = other DNA
agcgatcatttagccgaacatcagcgcacgcatacc

SEQ ID NO: 1727 - DNA, 36 bp, synthetic construct
  source 1..36: mol_type = other DNA
cattggggcgaccgcagcgcggatatggccacgcgt

SEQ ID NO: 1728 - DNA, 36 bp, synthetic construct
  source 1..36: mol_type = other DNA
aaaagcggccaattactgcatgaattattaaaagaa

SEQ ID NO: 1729 - DNA, 36 bp, synthetic construct
  source 1..36: mol_type = other DNA
gaagcgctgtctaagctgctggaacgcatcaaacag

SEQ ID NO: 1730 - DNA, 36 bp, synthetic construct
  source 1..36: mol_type = other DNA
cgtgatctgacggacctgatggcgaaaaacatggaa

SEQ ID NO: 1731 - DNA, 36 bp, synthetic construct
  source 1..36: mol_type = other DNA
cgttatgatacgttagtgagcgtgttagagcgtgaa

SEQ ID NO: 1732 - DNA, 36 bp, synthetic construct
  source 1..36: mol_type = other DNA
cagaaagaaatcgaccgtctgaatgaggttgcgaaa

SEQ ID NO: 1733 - DNA, 36 bp, synthetic construct
  source 1..36: mol_type = other DNA
gaaagcctggttgagaaagtgaaagagttcctgagc

SEQ ID NO: 1734 - DNA, 36 bp, synthetic construct
  source 1..36: mol_type = other DNA
aaagaagatgccttaaaactggtgcaattaaaacag

SEQ ID NO: 1735 - DNA, 36 bp, synthetic construct
  source 1..36: mol_type = other DNA
gtggaacagttacgcaaagaaggcaacgagctgttt

SEQ ID NO: 1736 - DNA, 36 bp, synthetic construct
  source 1..36: mol_type = other DNA
aaaacccagatgcaagagaaagcgaaagagatctat

SEQ ID NO: 1737 - DNA, 36 bp, synthetic construct
  source 1..36: mol_type = other DNA
ctgaataccaaggttgaagtgctgcgcgaggtggaa

SEQ ID NO: 1738 - DNA, 36 bp, synthetic construct
  source 1..36: mol_type = other DNA
cagctgaaatctgttattaaaaaataccgcgaagaa

SEQ ID NO: 1739 - DNA, 36 bp, synthetic construct
  source 1..36: mol_type = other DNA
accagcaaatggatcgacgatgtgcgtacggagcgt

SEQ ID NO: 1740 - DNA, 36 bp, synthetic construct
  source 1..36: mol_type = other DNA
aaagatgaaatcgacagcaaactggttaactttatt

SEQ ID NO: 1741 - DNA, 36 bp, synthetic construct
  source 1..36: mol_type = other DNA
agcgatatgcgtacggagattattcgtatgatggaa

SEQ ID NO: 1742 - DNA, 36 bp, synthetic construct
  source 1..36: mol_type = other DNA
accaccaaatggatcgacgatgtgcgtacggagcgt

SEQ ID NO: 1743 - DNA, 36 bp, synthetic construct
  source 1..36: mol_type = other DNA
gaaattcatttagagaatatgctgaaaatcacgcgt

SEQ ID NO: 1744 - DNA, 36 bp, synthetic construct
  source 1..36: mol_type = other DNA
cgtctggatttagactttcatcagcgcgttcatacc

SEQ ID NO: 1745 - DNA, 36 bp, synthetic construct
  source 1..36: mol_type = other DNA
aaaagccagttaatcattcatgaacgcatccatacc

SEQ ID NO: 1746 - DNA, 36 bp, synthetic construct
  source 1..36: mol_type = other DNA
agcgtggaacgctacattgtgagccgcttacgtgat

SEQ ID NO: 1747 - DNA, 36 bp, synthetic construct
  source 1..36: mol_type = other DNA
aaacatgatgttgagacctttcgtcaattaattggc

SEQ ID NO: 1748 - DNA, 36 bp, synthetic construct
  source 1..36: mol_type = other DNA
tatgaaaaagcccgcaccctgattgagaaggtgagc

SEQ ID NO: 1749 - DNA, 36 bp, synthetic construct
  source 1..36: mol_type = other DNA
gaactgagcgaccgcgtgctgcgtgccgccaaacag

SEQ ID NO: 1750 - DNA, 36 bp, synthetic construct
  source 1..36: mol_type = other DNA
aaagatcagttaatggagaaatatcgtaagatcacc

SEQ ID NO: 1751 - DNA, 36 bp, synthetic construct
  source 1..36: mol_type = other DNA
ccggaacgtgagttaaccgaaacccgcgagaaactg

SEQ ID NO: 1752 - DNA, 36 bp, synthetic construct
  source 1..36: mol_type = other DNA
gaactgaaagagttaattcgtaaacaccaaaatgat

SEQ ID NO: 1753 - DNA, 36 bp, synthetic construct
  source 1..36: mol_type = other DNA
tttgatgatatcaagaaaattatttctaagcagctg

SEQ ID NO: 1754 - DNA, 36 bp, synthetic construct
  source 1..36: mol_type = other DNA
attacccgtgactctgtgattcgtatcgccaaagat

SEQ ID NO: 1755 - DNA, 36 bp, synthetic construct
  source 1..36: mol_type = other DNA
tggaaagatgccatcaaagaaatgaaacaaacgatt

SEQ ID NO: 1756 - DNA, 36 bp, synthetic construct
  source 1..36: mol_type = other DNA
gaaagcgcggttcgcgtggtggaacgcttaaatcgt

SEQ ID NO: 1757 - DNA, 36 bp, synthetic construct
  source 1..36: mol_type = other DNA
gatctgaaagccttaagcagcgcgttacacgaacgt

SEQ ID NO: 1758 - DNA, 36 bp, synthetic construct
  source 1..36: mol_type = other DNA
gtggatcgtggtacggaactgctggagcgcagcctg

SEQ ID NO: 1759 - DNA, 36 bp, synthetic construct
  source 1..36: mol_type = other DNA
ggcgaaacccaccgccatcgtaaacaaatgttcatg

SEQ ID NO: 1760 - DNA, 36 bp, synthetic construct
  source 1..36: mol_type = other DNA
aaagaaaccgagaacaaaattattaaggactataaa

SEQ ID NO: 1761 - DNA, 36 bp, synthetic construct
  source 1..36: mol_type = other DNA
aaagataaattattaagctttctggacacgcatctg

SEQ ID NO: 1762 - DNA, 36 bp, synthetic construct
  source 1..36: mol_type = other DNA
gaaattgcgaaggagacccaggcgcgcgttctggaa

SEQ ID NO: 1763 - DNA, 36 bp, synthetic construct
  source 1..36: mol_type = other DNA
tataccgaacgcgaccgtattcagcgcgagcgtctg

SEQ ID NO: 1764 - DNA, 36 bp, synthetic construct
  source 1..36: mol_type = other DNA
gataccgaacgcgcccagctggatgttatgaagctg

SEQ ID NO: 1765 - DNA, 36 bp, synthetic construct
  source 1..36: mol_type = other DNA
ctgaccctgttagagaaaaccctgaaggagcgtctg

SEQ ID NO: 1766 - DNA, 36 bp, synthetic construct
  source 1..36: mol_type = other DNA
cgtaaaattacggacgatctggtgaagaacgtggaa

SEQ ID NO: 1767 - DNA, 36 bp, synthetic construct
  source 1..36: mol_type = other DNA
caggaaaccatcaagcatgtgaaagacttaattgcg

SEQ ID NO: 1768 - DNA, 36 bp, synthetic construct
  source 1..36: mol_type = other DNA
accgatgtggaccaaaaagtggatcaagttgcgcgt

SEQ ID NO: 1769 - DNA, 36 bp, synthetic construct
  source 1..36: mol_type = other DNA
agcgatattacggacgaacagaaaaaggttcgtgaa

SEQ ID NO: 1770 - DNA, 36 bp, synthetic construct
  source 1..36: mol_type = other DNA
gaaaatagccgcgttctggtgaaaaagttagcggaa

SEQ ID NO: 1771 - DNA, 36 bp, synthetic construct
  source 1..36: mol_type = other DNA
accgataccgccttaaaagaactggagaaggtgacc

SEQ ID NO: 1772 - DNA, 36 bp, synthetic construct
  source 1..36: mol_type = other DNA
cataaatttatcgacaccattaccgaccacatgacc

SEQ ID NO: 1773 - DNA, 36 bp, synthetic construct
  source 1..36: mol_type = other DNA
gatgaaaccttagccaaaattaaaaaggcctggaat

SEQ ID NO: 1774 - DNA, 36 bp, synthetic construct
  source 1..36: mol_type = other DNA
aaaggcacccaagccgatcgtattgttgagaaatat

SEQ ID NO: 1775 - DNA, 36 bp, synthetic construct
  source 1..36: mol_type = other DNA
accggccgtatctacagcgatgtgttacgcaaagaa

SEQ ID NO: 1776 - DNA, 36 bp, synthetic construct
  source 1..36: mol_type = other DNA
aatgaagatttcgttcgtctgagcacggaggcgcgt

SEQ ID NO: 1777 - DNA, 36 bp, synthetic construct
  source 1..36: mol_type = other DNA
ccgcgttttcaagagctgaaaagcgagacgctgaaa

SEQ ID NO: 1778 - DNA, 36 bp, synthetic construct
  source 1..36: mol_type = other DNA
gcgcgtgcgcaagccaaacagctggagcacctgaaa

SEQ ID NO: 1779 - DNA, 36 bp, synthetic construct
  source 1..36: mol_type = other DNA
gaagtgagcatcaacgatgcgcgtgttcgcgcgcgt

SEQ ID NO: 1780 - DNA, 36 bp, synthetic construct
  source 1..36: mol_type = other DNA
gaatttaaattaacgagcgcgattaagaaggaactg

SEQ ID NO: 1781 - DNA, 36 bp, synthetic construct
  source 1..36: mol_type = other DNA
aaagaaacctctgacctgctgcgtaagatcgcggcg

SEQ ID NO: 1782 - DNA, 36 bp, synthetic construct
  source 1..36: mol_type = other DNA
gaacatacctctgaccgtaaactgttagccaaagaa

SEQ ID NO: 1783 - DNA, 36 bp, synthetic construct
  source 1..36: mol_type = other DNA
aaagataaaacgaagggcgatgcgatcgacctgagc

SEQ ID NO: 1784 - DNA, 36 bp, synthetic construct
  source 1..36: mol_type = other DNA
gaaaccgcgacgcgcgatcagctgacgaaggaagcg

SEQ ID NO: 1785 - DNA, 36 bp, synthetic construct
  source 1..36: mol_type = other DNA
ccggaagataagacgaccgtgcatcgcaagtggagc

SEQ ID NO: 1786 - DNA, 36 bp, synthetic construct
  source 1..36: mol_type = other DNA
atgaatgaaggtgcccgtcatatgcgtgagttcacc

SEQ ID NO: 1787 - DNA, 36 bp, synthetic construct
  source 1..36: mol_type = other DNA
cgtgaaaaagacttaagctggattacccaacacgcg

SEQ ID NO: 1788 - DNA, 36 bp, synthetic construct
  source 1..36: mol_type = other DNA
gatcaggtgaaggaggaaatgaaaattttagttcag

SEQ ID NO: 1789 - DNA, 36 bp, synthetic construct
  source 1..36: mol_type = other DNA
gaagatgatttaacgaaagtgctgaactacaccaaa

SEQ ID NO: 1790 - DNA, 36 bp, synthetic construct
  source 1..36: mol_type = other DNA
gaacgtgcgaacgagctggtggaatcttaccgtaaa

SEQ ID NO: 1791 - DNA, 36 bp, synthetic construct
  source 1..36: mol_type = other DNA
cgtaccagcatcgaccatctgaaagagatcgcgcgt

SEQ ID NO: 1792 - DNA, 36 bp, synthetic construct
  source 1..36: mol_type = other DNA
aaagatgatttagcccgtattattacggccgaaagc

SEQ ID NO: 1793 - DNA, 36 bp, synthetic construct
  source 1..36: mol_type = other DNA
agcaaactgttacgcgatagccatgttttacatagc

SEQ ID NO: 1794 - DNA, 36 bp, synthetic construct
  source 1..36: mol_type = other DNA
gcgaccgatttaaaggaaaccgcgaagaagctgctg

SEQ ID NO: 1795 - DNA, 36 bp, synthetic construct
  source 1..36: mol_type = other DNA
cgtaccacccgcgagctggtgggcgacttactggat

SEQ ID NO: 1796 - DNA, 36 bp, synthetic construct
  source 1..36: mol_type = other DNA
aatagcaccatcgacaaacgtgtggagcgcctgatt

SEQ ID NO: 1797 - DNA, 36 bp, synthetic construct
  source 1..36: mol_type = other DNA
ccgagcaaataccgcgatgaactgacggccaaactg

SEQ ID NO: 1798 - DNA, 36 bp, synthetic construct
  source 1..36: mol_type = other DNA
gaaaaagaatacaaggaactgcgtaacgccattagc

SEQ ID NO: 1799 - DNA, 36 bp, synthetic construct
  source 1..36: mol_type = other DNA
gaaaaaaccttacgcgataaactggttttagcgacc

SEQ ID NO: 1800 - DNA, 36 bp, synthetic construct
  source 1..36: mol_type = other DNA
ctgtttgatcgcttagatgaacatgcccgccagaat

SEQ ID NO: 1801 - DNA, 36 bp, synthetic construct
  source 1..36: mol_type = other DNA
ctggataccgactaccagatgaccaaaaaggacatg

SEQ ID NO: 1802 - DNA, 36 bp, synthetic construct
  source 1..36: mol_type = other DNA
cgtaaacatgagcaaatgtttcgtgaagccgttaat

SEQ ID NO: 1803 - DNA, 36 bp, synthetic construct
  source 1..36: mol_type = other DNA
aaagaaagcttagaggcgctggatgccgccaaaacc

SEQ ID NO: 1804 - DNA, 36 bp, synthetic construct
  source 1..36: mol_type = other DNA
catgatgtgtaccgcgatgaagcgttaaacaatcgt

SEQ ID NO: 1805 - DNA, 36 bp, synthetic construct
  source 1..36: mol_type = other DNA
gaaaaagatatcgagaattttatgaaaaacgagaaa

SEQ ID NO: 1806 - DNA, 36 bp, synthetic construct
  source 1..36: mol_type = other DNA
gattttaatttacgcacccatgtgcgcatccatacc

SEQ ID NO: 1807 - DNA, 36 bp, synthetic construct
  source 1..36: mol_type = other DNA
gcgacccaggttgaggaaaaactgcgcgccgaatat

SEQ ID NO: 1808 - DNA, 36 bp, synthetic construct
  source 1..36: mol_type = other DNA
aaagtgacccacttcgaacgtctgcaccacaaaacc

SEQ ID NO: 1809 - DNA, 36 bp, synthetic construct
  source 1..36: mol_type = other DNA
aaagaagaattagagctggcgaattggatctctaaa

SEQ ID NO: 1810 - DNA, 36 bp, synthetic construct
  source 1..36: mol_type = other DNA
catgatatttaccgcgatgaagcgttaaacaatcgt

SEQ ID NO: 1811 - DNA, 36 bp, synthetic construct
  source 1..36: mol_type = other DNA
cgtgatgaattaaacgcgtataaatctaagctgaaa

SEQ ID NO: 1812 - DNA, 36 bp, synthetic construct
  source 1..36: mol_type = other DNA
attgaaaatgttaaggcgaaaattcaagacaaactg

SEQ ID NO: 1813 - DNA, 36 bp, synthetic construct
  source 1..36: mol_type = other DNA
ccggaagataaggttaaagcggtgacgaagctgaat

SEQ ID NO: 1814 - DNA, 36 bp, synthetic construct
  source 1..36: mol_type = other DNA
aaaaccgtggaggagattgatcagaagttaaaaagc

SEQ ID NO: 1815 - DNA, 36 bp, synthetic construct
  source 1..36: mol_type = other DNA
aaagatcgtttagttgaaagcgtgcaagacgtgctg

SEQ ID NO: 1816 - DNA, 36 bp, synthetic construct
  source 1..36: mol_type = other DNA
aaacaggaacgcacgctgtttaaagagttaattaaa

SEQ ID NO: 1817 - DNA, 36 bp, synthetic construct
  source 1..36: mol_type = other DNA
gaaaaagtggtttctgaactgaaacaattagcggaa

SEQ ID NO: 1818 - DNA, 36 bp, synthetic construct
  source 1..36: mol_type = other DNA
caggaaaaattagacgcgatggtggaacgcacgcgt

SEQ ID NO: 1819 - DNA, 36 bp, synthetic construct
  source 1..36: mol_type = other DNA
atgaaaacccgcttcaaaattcagcacgccaccgaa

SEQ ID NO: 1820 - DNA, 36 bp, synthetic construct
  source 1..36: mol_type = other DNA
cagtatattgagggtgaaatgcgtacccgcatccgt

SEQ ID NO: 1821 - DNA, 36 bp, synthetic construct
  source 1..36: mol_type = other DNA
agcgtgacccgcgttaaaattgcgttagaggaaaaa

SEQ ID NO: 1822 - DNA, 36 bp, synthetic construct
  source 1..36: mol_type = other DNA
atgcgtgatgcctctcagtggattaaacgcatggaa

SEQ ID NO: 1823 - DNA, 36 bp, synthetic construct
  source 1..36: mol_type = other DNA
cgtaaagatcgcgacaccgcgcgtcaattacatgaa

SEQ ID NO: 1824 - DNA, 36 bp, synthetic construct
  source 1..36: mol_type = other DNA
catgaactgaactctaaaattaaagacttagaaacc

SEQ ID NO: 1825 - DNA, 36 bp, synthetic construct
  source 1..36: mol_type = other DNA
gatggcacccgcttactggatagcatccgcgatctg

SEQ ID NO: 1826 - DNA, 36 bp, synthetic construct
  source 1..36: mol_type = other DNA
ctgattgatgtttacaaaaaaaccttaaagagcgat

SEQ ID NO: 1827 - DNA, 36 bp, synthetic construct
  source 1..36: mol_type = other DNA
aaagaacgtttaaaggaactgattttccaagaaacc

SEQ ID NO: 1828 - DNA, 36 bp, synthetic construct
  source 1..36: mol_type = other DNA
agccgtattaacgaggcgcgtaaagaggttgaaatg

SEQ ID NO: 1829 - DNA, 36 bp, synthetic construct
  source 1..36: mol_type = other DNA
ccggatgatatcgccgaactgaaaacgcgcctgacc

SEQ ID NO: 1830 - DNA, 36 bp, synthetic construct
  source 1..36: mol_type = other DNA
catctggatcaattaaaagaaattatgaaggttacc

SEQ ID NO: 1831 - DNA, 36 bp, synthetic construct
  source 1..36: mol_type = other DNA
cgtgaaatggtggaccaaattaatcgtgttgcccgt

SEQ ID NO: 1832 - DNA, 36 bp, synthetic construct
  source 1..36: mol_type = other DNA
catagcaaataccgcgaagaagcgatgcaaaaccgt

SEQ ID NO: 1833 - DNA, 36 bp, synthetic construct
  source 1..36: mol_type = other DNA
gcggataccatcaagaaactgaccgacaagattaaa

SEQ ID NO: 1834 - DNA, 36 bp, synthetic construct
  source 1..36: mol_type = other DNA
aaaattgtggagttagaaaatgaattcttaaaaagc

SEQ ID NO: 1835 - DNA, 36 bp, synthetic construct
  source 1..36: mol_type = other DNA
ctggatgatttcaaccgtgaaattgttaagcagctg

SEQ ID NO: 1836 - DNA, 36 bp, synthetic construct
  source 1..36: mol_type = other DNA
attagcagctacaaggaaaaactggagaaggaacat

SEQ ID NO: 1837 - DNA, 36 bp, synthetic construct
  source 1..36: mol_type = other DNA
ctgcgtaaacaattaagcctggatgttttagataaa

SEQ ID NO: 1838 - DNA, 36 bp, synthetic construct
  source 1..36: mol_type = other DNA
cgtgaagaattcacgaaaaaagtgcgcacgaatgcg

SEQ ID NO: 1839 - DNA, 36 bp, synthetic construct
  source 1..36: mol_type = other DNA
aaagaagaaaagtctgcgattcgtgactacaccaaa

SEQ ID NO: 1840 - DNA, 36 bp, synthetic construct
  source 1..36: mol_type = other DNA
ctggataaagttttaagcaaactgtctgagaaatat

SEQ ID NO: 1841 - DNA, 36 bp, synthetic construct
  source 1..36: mol_type = other DNA
gaaaaaaccgccgaggattttaccccaacggtgcgt

SEQ ID NO: 1842 - DNA, 36 bp, synthetic construct
  source 1..36: mol_type = other DNA
agcattgataagtctgaactgctgtacaaggtggat

SEQ ID NO: 1843 - DNA, 36 bp, synthetic construct
  source 1..36: mol_type = other DNA
aaacgtattatcaaggaaaccgaaaagttagtgagc

SEQ ID NO: 1844 - DNA, 36 bp, synthetic construct
  source 1..36: mol_type = other DNA
accgcggaagagttcgcgaatcgtttatctaaagat

SEQ ID NO: 1845 - DNA, 36 bp, synthetic construct
  source 1..36: mol_type = other DNA
ctggataatttacgcgataccgtgcgcaagtttctg

SEQ ID NO: 1846 - DNA, 36 bp, synthetic construct
  source 1..36: mol_type = other DNA
gaaaaagcgaagaaccgtctgaatacggagctgtat

SEQ ID NO: 1847 - DNA, 36 bp, synthetic construct
  source 1..36: mol_type = other DNA
gcgccggaacacacgcgtctgcgtaagttagtgacc

SEQ ID NO: 1848 - DNA, 36 bp, synthetic construct
  source 1..36: mol_type = other DNA
cagcatagcgccgagctgattaaacacttaattaaa

SEQ ID NO: 1849 - DNA, 36 bp, synthetic construct
  source 1..36: mol_type = other DNA
aaagaacagaagacgcagcgtctgatctctgaactg

SEQ ID NO: 1850 - DNA, 36 bp, synthetic construct
  source 1..36: mol_type = other DNA
aaagatcatttcgttaaactggaaacgatcgatagc

SEQ ID NO: 1851 - DNA, 36 bp, synthetic construct
  source 1..36: mol_type = other DNA
cgtgaaatgctggcctctattgataccttaaaggat

SEQ ID NO: 1852 - DNA, 36 bp, synthetic construct
  source 1..36: mol_type = other DNA
gcggatgaaatcaagaccgcgattgacacggcgcgt

SEQ ID NO: 1853 - DNA, 36 bp, synthetic construct
  source 1..36: mol_type = other DNA
ctgagcgaaaaggaggcgctgattaagcaaattaaa

SEQ ID NO: 1854 - DNA, 36 bp, synthetic construct
  source 1..36: mol_type = other DNA
aaagatcaggagatcaaaaaactggttgaccagaat

SEQ ID NO: 1855 - DNA, 36 bp, synthetic construct
  source 1..36: mol_type = other DNA
gaaaatctgaagcgctatgtggaacgcatggagagc

SEQ ID NO: 1856 - DNA, 36 bp, synthetic construct
  source 1..36: mol_type = other DNA
cagagcaccttagacaaactgatgcgtgacttagat

SEQ ID NO: 1857 - DNA, 36 bp, synthetic construct
  source 1..36: mol_type = other DNA
gcgaaagatatcgccgatgcggtgcgcaagaccagc

SEQ ID NO: 1858 - DNA, 36 bp, synthetic construct
  source 1..36: mol_type = other DNA
gataatgcgttacgcaaaagccatcacgccggcatg

SEQ ID NO: 1859 - DNA, 36 bp, synthetic construct
  source 1..36: mol_type = other DNA
gatgaagtgacgaacggcattgtgaaggagcgtctg

SEQ ID NO: 1860 - DNA, 36 bp, synthetic construct
  source 1..36: mol_type = other DNA
aaagatattacgcaaaaatatcgtacgatcctggat

SEQ ID NO: 1861 - DNA, 36 bp, synthetic construct
  source 1..36: mol_type = other DNA
attgaaaatgttaaggcgaaaattcaagacaaaatt

SEQ ID NO: 1862 - DNA, 36 bp, synthetic construct
  source 1..36: mol_type = other DNA
aaagataccgttgagaaagtgcgtcaaacgtttgaa

SEQ ID NO: 1863 - DNA, 36 bp, synthetic construct
  source 1..36: mol_type = other DNA
gaagatcgtgttaaggaagtggtgacgaagtatagc

SEQ ID NO: 1864 - DNA, 36 bp, synthetic construct
  source 1..36: mol_type = other DNA
cagatggaacgcgttcgtaccctgacggacgtgcgt

SEQ ID NO: 1865 - DNA, 36 bp, synthetic construct
  source 1..36: mol_type = other DNA
ctgaaagaacgctaccagaaaattggtgacaccaaa

SEQ ID NO: 1866 - DNA, 36 bp, synthetic construct
  source 1..36: mol_type = other DNA
agcaaagaaaacatgtctctgctgaaacacttaaaa

SEQ ID NO: 1867 - DNA, 36 bp, synthetic construct
  source 1..36: mol_type = other DNA
aaaggcacccaagccgaacgtattgttgagaaatat

SEQ ID NO: 1868 - DNA, 36 bp, synthetic construct
  source 1..36: mol_type = other DNA
aaaggcacccaaggtgaaaaaattgttgaggattat

SEQ ID NO: 1869 - DNA, 36 bp, synthetic construct
  source 1..36: mol_type = other DNA
cgtaaagaatctcacctggaaaaacaaaagattgat

SEQ ID NO: 1870 - DNA, 36 bp, synthetic construct
  source 1..36: mol_type = other DNA
gcgagcgcggacgccgaacgtctgcaccgcagcatg

SEQ ID NO: 1871 - DNA, 36 bp, synthetic construct
  source 1..36: mol_type = other DNA
aaaattggcaaggagcatattaatcgcatcaccaat

SEQ ID NO: 1872 - DNA, 36 bp, synthetic construct
  source 1..36: mol_type = other DNA
aaagaaagcttattacgtgaagtgcaattactgaaa

SEQ ID NO: 1873 - DNA, 36 bp, synthetic construct
  source 1..36: mol_type = other DNA
cgtgtgcgtaaccaatttctgaaagagatggacggc

SEQ ID NO: 1874 - DNA, 36 bp, synthetic construct
  source 1..36: mol_type = other DNA
cgtgcggatatcatgacgaaactgaatgaggacttt

SEQ ID NO: 1875 - DNA, 36 bp, synthetic construct
  source 1..36: mol_type = other DNA
agccgtggccgcgacctgctgaccgactggttaaaa

SEQ ID NO: 1876 - DNA, 36 bp, synthetic construct
  source 1..36: mol_type = other DNA
ccggatcgtttagcccagattgtggagcgcacccgt

SEQ ID NO: 1877 - DNA, 36 bp, synthetic construct
  source 1..36: mol_type = other DNA
agcgataaattacaaaaagaagtggagggtctggtg

SEQ ID NO: 1878 - DNA, 36 bp, synthetic construct
  source 1..36: mol_type = other DNA
ccgaaaacccaattactgcattttatccgcgaagaa

SEQ ID NO: 1879 - DNA, 36 bp, synthetic construct
  source 1..36: mol_type = other DNA
aatgaatatcgccacctgcagcattctatcaaagaa

SEQ ID NO: 1880 - DNA, 36 bp, synthetic construct
  source 1..36: mol_type = other DNA
aaatgggtgcaagacagcatggatcatttagacaaa

SEQ ID NO: 1881 - DNA, 36 bp, synthetic construct
  source 1..36: mol_type = other DNA
cagtttgaattattagaacgtgcgaaccacaaactg

SEQ ID NO: 1882 - DNA, 36 bp, synthetic construct
  source 1..36: mol_type = other DNA
gatatgcgtacggaggtgattcgtatgatggagagc

SEQ ID NO: 1883 - DNA, 36 bp, synthetic construct
  source 1..36: mol_type = other DNA
aaacagcgtgaggttctgctgaaaacgttatatcat

SEQ ID NO: 1884 - DNA, 36 bp, synthetic construct
  source 1..36: mol_type = other DNA
cgtgaaaccatgttagaggtggtggaacgcacggcg

SEQ ID NO: 1885 - DNA, 36 bp, synthetic construct
  source 1..36: mol_type = other DNA
gaaaatgaagccttcaaaattgatacgcgcattggc

SEQ ID NO: 1886 - DNA, 36 bp, synthetic construct
  source 1..36: mol_type = other DNA
gcggaaaccatcgacaaactggtggagcgcacccgt

SEQ ID NO: 1887 - DNA, 36 bp, synthetic construct
  source 1..36: mol_type = other DNA
aaagtggatatggcccgcgaaattagcaagcaactg

SEQ ID NO: 1888 - DNA, 36 bp, synthetic construct
  source 1..36: mol_type = other DNA
cagcgtgatcgcgaggaagcgctgcaccaatttcgt

SEQ ID NO: 1889 - DNA, 36 bp, synthetic construct
  source 1..36: mol_type = other DNA
tatgatgaaatggttgagaccatgcgtaaaatcagc

SEQ ID NO: 1890 - DNA, 36 bp, synthetic construct
  source 1..36: mol_type = other DNA
aaaagcgaaaaggaggcgattgtgtcttacaccaaa

SEQ ID NO: 1891 - DNA, 36 bp, synthetic construct
  source 1..36: mol_type = other DNA
gatgcgaaagcccgcgatgtggtgaaccgcctgacc

SEQ ID NO: 1892 - DNA, 36 bp, synthetic construct
  source 1..36: mol_type = other DNA
gatgatgtgcaaaaggtgtttcaggttgccaaagaa

SEQ ID NO: 1893 - DNA, 36 bp, synthetic construct
  source 1..36: mol_type = other DNA
aaaaaacaggacgacaatctggaacacttcattagc

SEQ ID NO: 1894 - DNA, 36 bp, synthetic construct
  source 1..36: mol_type = other DNA
aatgtgaccttccgcaaagaactggagaagattctg

SEQ ID NO: 1895 - DNA, 36 bp, synthetic construct
  source 1..36: mol_type = other DNA
attcagggcaaggttgatgaagtgttccgcaaacag

SEQ ID NO: 1896 - DNA, 36 bp, synthetic construct
  source 1..36: mol_type = other DNA
gaagataaagccgttgaactgtattctcgcaccgcg

SEQ ID NO: 1897 - DNA, 36 bp, synthetic construct
  source 1..36: mol_type = other DNA
gatgaacagcgcaagctgctgaaagaggcccaggcg

SEQ ID NO: 1898 - DNA, 36 bp, synthetic construct
  source 1..36: mol_type = other DNA
ccgaccattatcaaggatcatctgaagaaggcgaat

SEQ ID NO: 1899 - DNA, 36 bp, synthetic construct
  source 1..36: mol_type = other DNA
gaactgaaaaagttagaactgctgcgccaaaatgcg

SEQ ID NO: 1900 - DNA, 36 bp, synthetic construct
  source 1..36: mol_type = other DNA
gaaaccattaagttactggaaaaaatcttagaaagc

SEQ ID NO: 1901 - DNA, 36 bp, synthetic construct
  source 1..36: mol_type = other DNA
accgataatgttgttgaaaaactgcgcaagaaatat

SEQ ID NO: 1902 - DNA, 36 bp, synthetic construct
  source 1..36: mol_type = other DNA
gtggatgaagccttaaaagatgcgcaaacgcgtatt

SEQ ID NO: 1903 - DNA, 36 bp, synthetic construct
  source 1..36: mol_type = other DNA
aaagtgtttgagacgctggaagcgcgcatgacggaa

SEQ ID NO: 1904 - DNA, 36 bp, synthetic construct
  source 1..36: mol_type = other DNA
gcgcgtgatgttttagataatctgttcgagaaaacc

SEQ ID NO: 1905 - DNA, 36 bp, synthetic construct
  source 1..36: mol_type = other DNA
ccggtgctggaccgcgtgctggaaaacaaccatcgt

SEQ ID NO: 1906 - DNA, 36 bp, synthetic construct
  source 1..36: mol_type = other DNA
gattttagcaaccaactgcgtgcggagttagaaaaa

SEQ ID NO: 1907 - DNA, 36 bp, synthetic construct
  source 1..36: mol_type = other DNA
gataaagaacgctctattattagcgacatctttagc

SEQ ID NO: 1908 - DNA, 36 bp, synthetic construct
  source 1..36: mol_type = other DNA
gaagaacatacgtacctgcatgcgcaacgccagaaa

SEQ ID NO: 1909 - DNA, 36 bp, synthetic construct
  source 1..36: mol_type = other DNA
cgtgatctgcgcaaggcgatgcagcagacgttagaa

SEQ ID NO: 1910 - DNA, 36 bp, synthetic construct
  source 1..36: mol_type = other DNA
aaaagcgaattagacgcgtataccaagaagctggtg

SEQ ID NO: 1911 - DNA, 36 bp, synthetic construct
  source 1..36: mol_type = other DNA
gaaaaagatcgcaacgatctgattacgtacctgaaa

SEQ ID NO: 1912 - DNA, 36 bp, synthetic construct
  source 1..36: mol_type = other DNA
acccgtaaattatctgaaaccgtgttagaggatgtg

SEQ ID NO: 1913 - DNA, 36 bp, synthetic construct
  source 1..36: mol_type = other DNA
gatgaaatggtggagacgatgcgtaaaatttctggc

SEQ ID NO: 1914 - DNA, 36 bp, synthetic construct
  source 1..36: mol_type = other DNA
agcgataaaatcaagaaatttctgacggagagccat

SEQ ID NO: 1915 - DNA, 36 bp, synthetic construct
  source 1..36: mol_type = other DNA
aaagaaaccaaggccctggcggatttcatccgtaat

SEQ ID NO: 1916 - DNA, 36 bp, synthetic construct
  source 1..36: mol_type = other DNA
ctgagcgaattagagaattttaaaaaggagctggcg

SEQ ID NO: 1917 - DNA, 36 bp, synthetic construct
  source 1..36: mol_type = other DNA
cgtgtggaaaagacgctggaactgatcaagcaggcg

SEQ ID NO: 1918 - DNA, 36 bp, synthetic construct
  source 1..36: mol_type = other DNA
catgaacagaagacgcgttatctgccacgcgtggcg

SEQ ID NO: 1919 - DNA, 36 bp, synthetic construct
  source 1..36: mol_type = other DNA
aaagatgtgtacgagaaaaccgaatctatcatgggc

SEQ ID NO: 1920 - DNA, 36 bp, synthetic construct
  source 1..36: mol_type = other DNA
tatagccatcgcgccgcgcagcgtgagcgcctggcg

SEQ ID NO: 1921 - DNA, 36 bp, synthetic construct
  source 1..36: mol_type = other DNA
agcgatcatttaacgacccatattcgcacgcatacc

SEQ ID NO: 1922 - DNA, 36 bp, synthetic construct
  source 1..36: mol_type = other DNA
ccgagcggcacgttcgtgcgtgaaaagatccgtgaa

SEQ ID NO: 1923 - DNA, 36 bp, synthetic construct
  source 1..36: mol_type = other DNA
aatgataaacgcgttcatcgtctgttaacggtgctg

SEQ ID NO: 1924 - DNA, 36 bp, synthetic construct
  source 1..36: mol_type = other DNA
gcggatgaattatctaatgcgaaaaaggttcgtgcg

SEQ ID NO: 1925 - DNA, 36 bp, synthetic construct
  source 1..36: mol_type = other DNA
accgaaaaagcctgggaggtgctgaccaaggcccgt

SEQ ID NO: 1926 - DNA, 36 bp, synthetic construct
  source 1..36: mol_type = other DNA
attattgataagttatatgaaaaagtttctaaaaat

SEQ ID NO: 1927 - DNA, 36 bp, synthetic construct
  source 1..36: mol_type = other DNA
gaaaaaagcttaacggatgcggtgaagttagcgcat

SEQ ID NO: 1928 - DNA, 36 bp, synthetic construct
  source 1..36: mol_type = other DNA
gaagatattgcccgcaaagaacagttaaagagcctg

SEQ ID NO: 1929 - DNA, 36 bp, synthetic construct
  source 1..36: mol_type = other DNA
aaaagcgataaggacgcgattgtgaacgcctggaaa

SEQ ID NO: 1930 - DNA, 36 bp, synthetic construct
  source 1..36: mol_type = other DNA
gaaaaactgaaccaactgtgggaaaaagcccaacgt

SEQ ID NO: 1931 - DNA, 36 bp, synthetic construct
  source 1..36: mol_type = other DNA
ccgctggaattcttacgtgcgaatcaacgcaaacat

SEQ ID NO: 1932 - DNA, 36 bp, synthetic construct
  source 1..36: mol_type = other DNA
accgatagcgccgagggcgtgcgtaagttcattcgt

SEQ ID NO: 1933 - DNA, 36 bp, synthetic construct
  source 1..36: mol_type = other DNA
gaagcggatatcacggcgattaaacgcttaagcgat

SEQ ID NO: 1934 - DNA, 36 bp, synthetic construct
  source 1..36: mol_type = other DNA
caggaagatttagacaaaatttttatcaacgtgcgt

SEQ ID NO: 1935 - DNA, 36 bp, synthetic construct
  source 1..36: mol_type = other DNA
agcaatcgtcacaaggaatttgaaaaccaaattcgt

SEQ ID NO: 1936 - DNA, 36 bp, synthetic construct
  source 1..36: mol_type = other DNA
cagaaagaattattagaagtgatggatcaattacgt

SEQ ID NO: 1937 - DNA, 36 bp, synthetic construct
  source 1..36: mol_type = other DNA
cgtgaagcgttagcccgtctggaaacgttagatacc

SEQ ID NO: 1938 - DNA, 36 bp, synthetic construct
  source 1..36: mol_type = other DNA
aaaagcctgttaaagattattaatgactacgaagaa

SEQ ID NO: 1939 - DNA, 36 bp, synthetic construct
  source 1..36: mol_type = other DNA
attaatcatgccatccgtcaggcgtacgaggataaa

SEQ ID NO: 1940 - DNA, 36 bp, synthetic construct
  source 1..36: mol_type = other DNA
gaaaaagcggagaagattaaaaatttattcaatgaa

SEQ ID NO: 1941 - DNA, 36 bp, synthetic construct
  source 1..36: mol_type = other DNA
aaacattttcgcacgcgtgaagtggccatcacccag

SEQ ID NO: 1942 - DNA, 36 bp, synthetic construct
  source 1..36: mol_type = other DNA
attagcgcgcgcatcaaagaagaattattaaaaaat

SEQ ID NO: 1943 - DNA, 36 bp, synthetic construct
  source 1..36: mol_type = other DNA
agcagcctgaaggacattgatattgcccgcgaaaat

SEQ ID NO: 1944 - DNA, 36 bp, synthetic construct
  source 1..36: mol_type = other DNA
accctgaaagttttacgtcatcatcaagagaaactg

SEQ ID NO: 1945 - DNA, 36 bp, synthetic construct
  source 1..36: mol_type = other DNA
aaagaagatatcgcccgtaaagaacaattaaaaagc

SEQ ID NO: 1946 - DNA, 36 bp, synthetic construct
  source 1..36: mol_type = other DNA
accctggtgaaggttaaagatgcggaggaccagctg

SEQ ID NO: 1947 - DNA, 39 bp, synthetic construct
  source 1..39: mol_type = other DNA
ggcgatctgatccgcgcgattcaggagacgcatgatcgt

SEQ ID NO: 1948 - DNA, 39 bp, synthetic construct
  source 1..39: mol_type = other DNA
ctggataatatgcgcgaggtggtggaacgcaaccgtgcg

SEQ ID NO: 1949 - DNA, 39 bp, synthetic construct
  source 1..39: mol_type = other DNA
ccgcatcaggagaagctgctgaaaatcttagcgaaaacc

SEQ ID NO: 1950 - DNA, 39 bp, synthetic construct
  source 1..39: mol_type = other DNA
aaaattacccaagacgcggcggaagccatcaaaaaatat

SEQ ID NO: 1951 - DNA, 39 bp, synthetic construct
  source 1..39: mol_type = other DNA
ctggaaaaaacgcacgaactgaaagaggttctgaataaa

SEQ ID NO: 1952 - DNA, 39 bp, synthetic construct
  source 1..39: mol_type = other DNA
gatgcgaccaaggccgcgaatgatgccttactgaaagaa

SEQ ID NO: 1953 - DNA, 39 bp, synthetic construct
  source 1..39: mol_type = other DNA
aatggcctggagcaagcgaaaaaattccacgaagcggtg

SEQ ID NO: 1954 - DNA, 39 bp, synthetic construct
  source 1..39: mol_type = other DNA
cgtagcgatgttttagatgcggcggttacgcgtaaaatt

SEQ ID NO: 1955 - DNA, 39 bp, synthetic construct
  source 1..39: mol_type = other DNA
gtggtggcggactctatgcagcgtcatgcccgcaaatat

SEQ ID NO: 1956 - DNA, 39 bp, synthetic construct
  source 1..39: mol_type = other DNA
gaaagcgcggttcgcgtggtggaacgcttaaatcgtcag

SEQ ID NO: 1957 - DNA, 39 bp, synthetic construct
  source 1..39: mol_type = other DNA
gatcgtgatacggagaccctggtgcactggatccgtaaa

SEQ ID NO: 1958 - DNA, 39 bp, synthetic construct
  source 1..39: mol_type = other DNA
accgtgctggttcaccgtgtgcattcttacctggaacgt

SEQ ID NO: 1959 - DNA, 39 bp, synthetic construct
  source 1..39: mol_type = other DNA
gaagaatatttaacgagcctgggccgcaagcatcgtgcg

SEQ ID NO: 1960 - DNA, 39 bp, synthetic construct
  source 1..39: mol_type = other DNA
agctatgaattagagcgtgtggtgcgccaactggaaaat

SEQ ID NO: 1961 - DNA, 39 bp, synthetic construct
  source 1..39: mol_type = other DNA
gtgaatcatttagttgataatacccgcaagctggaagaa

SEQ ID NO: 1962 - DNA, 39 bp, synthetic construct
  source 1..39: mol_type = other DNA
gtggaaaaagccgagaccctgcgtaagtggttaaatgaa

SEQ ID NO: 1963 - DNA, 39 bp, synthetic construct
  source 1..39: mol_type = other DNA
caggataaagttgttgaactggtggacatcatgcagaaa

SEQ ID NO: 1964 - DNA, 39 bp, synthetic construct
  source 1..39: mol_type = other DNA
agcattcatcgccacaccgtggtgaagttagcgcatacc

SEQ ID NO: 1965 - DNA, 39 bp, synthetic construct
  source 1..39: mol_type = other DNA
gtgaccgatgttacgaccaaagcgaagcaactgaaagat

SEQ ID NO: 1966 - DNA, 39 bp, synthetic construct
  source 1..39: mol_type = other DNA
gtggatgaagttcgcaaaatttttcgccaactggcgagc

SEQ ID NO: 1967 - DNA, 39 bp, synthetic construct
  source 1..39: mol_type = other DNA
gaaaccattacgttaaaaaaactggaggagtggaaaaat

SEQ ID NO: 1968 - DNA, 39 bp, synthetic construct
  source 1..39: mol_type = other DNA
ctgcgtaaacaattaagcctggatgttttagataaactg

SEQ ID NO: 1969 - DNA, 39 bp, synthetic construct
  source 1..39: mol_type = other DNA
gaacaggcggaccgcattgtgaaattcgccaaagcgaat

SEQ ID NO: 1970 - DNA, 39 bp, synthetic construct
  source 1..39: mol_type = other DNA
gcggatgaacgcgccaaaattaatcaaatcatttttgaa

SEQ ID NO: 1971 - DNA, 39 bp, synthetic construct
  source 1..39: mol_type = other DNA
cgttatcagaaggagcgtattgaaaacgttgcgcgtgaa

SEQ ID NO: 1972 - DNA, 39 bp, synthetic construct
  source 1..39: mol_type = other DNA
aaagatagcgacgacgatctggtgtaccgcagcctgaaa

SEQ ID NO: 1973 - DNA, 39 bp, synthetic construct
  source 1..39: mol_type = other DNA
ccggaaagcgttttaaaagtggcgcaccacgcgagcgaa

SEQ ID NO: 1974 - DNA, 39 bp, synthetic construct
  source 1..39: mol_type = other DNA
aaacatgaagcccaacgtctggaacaagaggcgcgtggc

SEQ ID NO: 1975 - DNA, 39 bp, synthetic construct
  source 1..39: mol_type = other DNA
aaacatctggttgagcagctgattcgcgacctgaaaacc

SEQ ID NO: 1976 - DNA, 39 bp, synthetic construct
  source 1..39: mol_type = other DNA
gaaaatagcttaaagaccgcgcagaaggttcataccgaa

SEQ ID NO: 1977 - DNA, 39 bp, synthetic construct
  source 1..39: mol_type = other DNA
ccgcgtaataacttaaaacgtattttaaaggaaatggaa

SEQ ID NO: 1978 - DNA, 39 bp, synthetic construct
  source 1..39: mol_type = other DNA
gaagatcagatcaacaaactggtggagttagtgaaaagc

SEQ ID NO: 1979 - DNA, 39 bp, synthetic construct
  source 1..39: mol_type = other DNA
gcgcaggcggacttactgaatctgaagcgcaaagtggat

SEQ ID NO: 1980 - DNA, 39 bp, synthetic construct
  source 1..39: mol_type = other DNA
gatgaacagcgcaagctgctgaaagaggcccaggcggaa

SEQ ID NO: 1981 - DNA, 39 bp, synthetic construct
  source 1..39: mol_type = other DNA
atggatattacgatgttcaaagaagatttaaagagccat

SEQ ID NO: 1982 - DNA, 39 bp, synthetic construct
  source 1..39: mol_type = other DNA
gatggcaccatcaagaaatggcaggatatcgcccgtaaa

SEQ ID NO: 1983 - DNA, 39 bp, synthetic construct
  source 1..39: mol_type = other DNA
gtggatcgtatcaacgatcgtctgcaagccattgatacc

SEQ ID NO: 1984 - DNA, 39 bp, synthetic construct
  source 1..39: mol_type = other DNA
aaagatgaagttgagcgtaaaatgaaatctttactgaat

SEQ ID NO: 1985 - DNA, 39 bp, synthetic construct
  source 1..39: mol_type = other DNA
gtggaaagcttaaaccgtgcggatcgcgaggcgcaggcg

SEQ ID NO: 1986 - DNA, 39 bp, synthetic construct
  source 1..39: mol_type = other DNA
ccgaccgtgcgcgagctgaaagaaacgttagaaaatagc

SEQ ID NO: 1987 - DNA, 39 bp, synthetic construct
  source 1..39: mol_type = other DNA
ccgaaagaattattagatcgtgcgacgacgctgctggaa

SEQ ID NO: 1988 - DNA, 39 bp, synthetic construct
  source 1..39: mol_type = other DNA
gaagaagcgttatctaaactgctggagcgcattaaacag

SEQ ID NO: 1989 - DNA, 39 bp, synthetic construct
  source 1..39: mol_type = other DNA
aaaaccgaattaatccagaaagcgaagttagcggaacag

SEQ ID NO: 1990 - DNA, 39 bp, synthetic construct
  source 1..39: mol_type = other DNA
gaaaaactgaaccaactgtgggaaaaagcccaacgtctg

SEQ ID NO: 1991 - DNA, 39 bp, synthetic construct
  source 1..39: mol_type = other DNA
accaaaaccatcgccatttatgataagttaaaagaactg

SEQ ID NO: 1992 - DNA, 39 bp, synthetic construct
  source 1..39: mol_type = other DNA
ccggattttcgcgacgaactgacccaagccgcgaaaaaa

SEQ ID NO: 1993 - DNA, 39 bp, synthetic construct
  source 1..39: mol_type = other DNA
ctggattttaagaaggaactggaacaaaaggtgaaacag

SEQ ID NO: 1994 - DNA, 39 bp, synthetic construct
  source 1..39: mol_type = other DNA
gtggaagtgaagtctgtggtggatttcatccagaaacat

SEQ ID NO: 1995 - DNA, 39 bp, synthetic construct
  source 1..39: mol_type = other DNA
aatgaaattcgcaagaaaatttatcaaaagattagcgaa

SEQ ID NO: 1996 - DNA, 39 bp, synthetic construct
  source 1..39: mol_type = other DNA
attagcaaagttcgccatatgcaggaatggttagagacc

SEQ ID NO: 1997 - DNA, 39 bp, synthetic construct
  source 1..39: mol_type = other DNA
gaagatgtgcgcgagaaactgcaggcctctctgaaaaat

SEQ ID NO: 1998 - DNA, 39 bp, synthetic construct
  source 1..39: mol_type = other DNA
ccgaaagatcaagagattaaaaaattagttgatcagaat

SEQ ID NO: 1999 - DNA, 39 bp, synthetic construct
  source 1..39: mol_type = other DNA
gatgaacataagttactgtttcgtgttttaaccaatctg

SEQ ID NO: 2000 - DNA, 39 bp, synthetic construct
  source 1..39: mol_type = other DNA
accaccaaagagttaattaaaaaattagccgaaattaat

SEQ ID NO: 2001 - DNA, 39 bp, synthetic construct
  source 1..39: mol_type = other DNA
agcgaagatgttgacattatttttacgcgcctgaaaggc

SEQ ID NO: 2002 - DNA, 39 bp, synthetic construct
  source 1..39: mol_type = other DNA
gaagattttgttaaggcgctgagcgacgccaaacagcgt

SEQ ID NO: 2003 - DNA, 39 bp, synthetic construct
  source 1..39: mol_type = other DNA
atgaaagaaacgcaagaaatgctggatttcgccgcgaaa

SEQ ID NO: 2004 - DNA, 39 bp, synthetic construct
  source 1..39: mol_type = other DNA
catctgacccgcgccgtggatcgtgccttagcgcgtagc

SEQ ID NO: 2005 - DNA, 39 bp, synthetic construct
  source 1..39: mol_type = other DNA
gaaaccaccttaaagcgtctgggcgccacgcatctgcgt

SEQ ID NO: 2006 - DNA, 39 bp, synthetic construct
  source 1..39: mol_type = other DNA
catagcaaataccgcgaagaagcgatgcaaaaccgtatt

SEQ ID NO: 2007 - DNA, 39 bp, synthetic construct
  source 1..39: mol_type = other DNA
gaagcggcgcgccaagatgcgcagcaataccgtaaaacc

SEQ ID NO: 2008 - DNA, 39 bp, synthetic construct
  source 1..39: mol_type = other DNA
gataccaccttaaagcgtctgggcgccacgcatctgaaa

SEQ ID NO: 2009 - DNA, 39 bp, synthetic construct
  source 1..39: mol_type = other DNA
tatcagaaagagatcgtggataaacacaacgcgctgcgt

SEQ ID NO: 2010 - DNA, 39 bp, synthetic construct
  source 1..39: mol_type = other DNA
catacccaggttatcgaactggaacgcaagtttagccat

SEQ ID NO: 2011 - DNA, 39 bp, synthetic construct
  source 1..39: mol_type = other DNA
gatgcggaacgcgagcgttttcgtaacttaacccaggaa

SEQ ID NO: 2012 - DNA, 39 bp, synthetic construct
  source 1..39: mol_type = other DNA
aaagtgcagttaaaggaactggaacgcgagtatgcgacc

SEQ ID NO: 2013 - DNA, 39 bp, synthetic construct
  source 1..39: mol_type = other DNA
ccggaacagaagaaggtgaatcaggttttaaaagaattt

SEQ ID NO: 2014 - DNA, 39 bp, synthetic construct
  source 1..39: mol_type = other DNA
gaaaaaattatcaaggaatttattcaaaagaccctgacc

SEQ ID NO: 2015 - DNA, 39 bp, synthetic construct
  source 1..39: mol_type = other DNA
cataaaaccatcgaccgttttattgccttaaccaaaacc

SEQ ID NO: 2016 - DNA, 39 bp, synthetic construct
  source 1..39: mol_type = other DNA
gcgctgaaagacgaggcgctgaaaacgttcgtggaacag

SEQ ID NO: 2017 - DNA, 39 bp, synthetic construct
  source 1..39: mol_type = other DNA
ccgaaactgacggaggcgctgaaagagcaagtggaaaaa

SEQ ID NO: 2018 - DNA, 39 bp, synthetic construct
  source 1..39: mol_type = other DNA
aaagcggtggagcaagtgaaaagcgacttcaataaactg

SEQ ID NO: 2019 - DNA, 39 bp, synthetic construct
  source 1..39: mol_type = other DNA
gtggaaagcttacgcaaactggtggaccacctgattaat

SEQ ID NO: 2020 - DNA, 39 bp, synthetic construct
  source 1..39: mol_type = other DNA
gatcaggattctaaccgtctgagcgacgccctgaccaaa

SEQ ID NO: 2021 - DNA, 39 bp, synthetic construct
  source 1..39: mol_type = other DNA
aaagaaatgtataacgagattattcgtgttttaaaaaat

SEQ ID NO: 2022 - DNA, 39 bp, synthetic construct
  source 1..39: mol_type = other DNA
gatggcgatttacgcgcgaccattcaagccctgcatcat

SEQ ID NO: 2023 - DNA, 39 bp, synthetic construct
  source 1..39: mol_type = other DNA
gtggaaatgaaatctgagtttctggcgacgaaggcgaaa

SEQ ID NO: 2024 - DNA, 39 bp, synthetic construct
  source 1..39: mol_type = other DNA
gcggaaaccttaatggaccgtattaaaaagcaactgcgt

SEQ ID NO: 2025 - DNA, 39 bp, synthetic construct
  source 1..39: mol_type = other DNA
gcggcgctggagacgcatgcgcaggccttacgtgaacgt

SEQ ID NO: 2026 - DNA, 39 bp, synthetic construct
  source 1..39: mol_type = other DNA
cgtgaaaaacgcgttagcaatgcggttgagtttctgctg

SEQ ID NO: 2027 - DNA, 39 bp, synthetic construct
  source 1..39: mol_type = other DNA
cgtgaactgacgtctctgctgaaagagttactggaaatg

SEQ ID NO: 2028 - DNA, 39 bp, synthetic construct
  source 1..39: mol_type = other DNA
acccatgaagccgttcatctgaccgcccacgcgaaagaa

SEQ ID NO: 2029 - DNA, 39 bp, synthetic construct
  source 1..39: mol_type = other DNA
ctggatgaattacaactgtttaccgacgccattcgtaaa

SEQ ID NO: 2030 - DNA, 39 bp, synthetic construct
  source 1..39: mol_type = other DNA
cgtgatagcttaggtgcgctgagcaaggccctgaaagaa

SEQ ID NO: 2031 - DNA, 39 bp, synthetic construct
  source 1..39: mol_type = other DNA
agcgatgaacgcgccgcggtgtatcgcgccattgaaacc

SEQ ID NO: 2032 - DNA, 39 bp, synthetic construct
  source 1..39: mol_type = other DNA
agcaaaggcgcccaagatctggcgcgcgccattaaagat

SEQ ID NO: 2033 - DNA, 39 bp, synthetic construct
  source 1..39: mol_type = other DNA
gatgaaattcgcaacgaagcgcatcaattactgaaactg

SEQ ID NO: 2034 - DNA, 39 bp, synthetic construct
  source 1..39: mol_type = other DNA
ccgcgtaccaacgagcgtatttttgagttactgctgcgt

SEQ ID NO: 2035 - DNA, 39 bp, synthetic construct
  source 1..39: mol_type = other DNA
ctgaaagaagccgttgaactggcgaagttcaccaccgat

SEQ ID NO: 2036 - DNA, 39 bp, synthetic construct
  source 1..39: mol_type = other DNA
catagcctgaacgttaaactggtgaaggagctggcgaaa

SEQ ID NO: 2037 - DNA, 39 bp, synthetic construct
  source 1..39: mol_type = other DNA
cataaaaatgttatgcgcatggtgaatcatgaggttagc

SEQ ID NO: 2038 - DNA, 39 bp, synthetic construct
  source 1..39: mol_type = other DNA
ccggaaaatgccatcaaacgtgcggacgagctgattagc

SEQ ID NO: 2039 - DNA, 39 bp, synthetic construct
  source 1..39: mol_type = other DNA
ctgaaacagttcaagaatgatctgaagcacgtgctgcag

SEQ ID NO: 2040 - DNA, 39 bp, synthetic construct
  source 1..39: mol_type = other DNA
cagcgtgtgatctctcatgtggaagccgaggcgaaaatt

SEQ ID NO: 2041 - DNA, 39 bp, synthetic construct
  source 1..39: mol_type = other DNA
accgataaattacgcggcgaagcgttagacctgcagcat

SEQ ID NO: 2042 - DNA, 39 bp, synthetic construct
  source 1..39: mol_type = other DNA
gatcgtgtgaacgaggcggcgcagttcgcccgtagcaaa

SEQ ID NO: 2043 - DNA, 39 bp, synthetic construct
  source 1..39: mol_type = other DNA
agctgggaagcccgcgcgctgctgcacacgctggaacat

SEQ ID NO: 2044 - DNA, 39 bp, synthetic construct
  source 1..39: mol_type = other DNA
cataccaccgttcgcaatgcgctgaaggacctgctgaaa

SEQ ID NO: 2045 - DNA, 39 bp, synthetic construct
  source 1..39: mol_type = other DNA
tgggatgatcaacaaaaagtgaaaaagacggcggaagcg

SEQ ID NO: 2046 - DNA, 39 bp, synthetic construct
  source 1..39: mol_type = other DNA
gaaaaagcgtaccgccaggtgaatgagttactgcataat

SEQ ID NO: 2047 - DNA, 39 bp, synthetic construct
  source 1..39: mol_type = other DNA
gaagaagataaggttgcggtgaaagccgccgtgcagaat

SEQ ID NO: 2048 - DNA, 39 bp, synthetic construct
  source 1..39: mol_type = other DNA
catcataccgcctctgaaagctttatgaagcacatgcag

SEQ ID NO: 2049 - DNA, 39 bp, synthetic construct
  source 1..39: mol_type = other DNA
agcgcgcaggttcaaaaagaagaacaattaaaaattgat

SEQ ID NO: 2050 - DNA, 39 bp, synthetic construct
  source 1..39: mol_type = other DNA
ctgagcgatacggttcgtgtgaatcgcaagatgcgtgat

SEQ ID NO: 2051 - DNA, 39 bp, synthetic construct
  source 1..39: mol_type = other DNA
ctggatgatgcccgcgcgctgaccacgcgcgcgaaagcg

SEQ ID NO: 2052 - DNA, 39 bp, synthetic construct
  source 1..39: mol_type = other DNA
gcggtgcagaaggagagcgatgaatacatcctggcgaaa

SEQ ID NO: 2053 - DNA, 39 bp, synthetic construct
  source 1..39: mol_type = other DNA
gcggtggaacgcacgcgtgaactgttcgccaaaagcctg

SEQ ID NO: 2054 - DNA, 39 bp, synthetic construct
  source 1..39: mol_type = other DNA
gatacccgtaaccgcctgctggcgcaattcgcggataaa

SEQ ID NO: 2055 - DNA, 39 bp, synthetic construct
  source 1..39: mol_type = other DNA
gaatttgcgaaggttattgtgcagaagttaaaagataat

SEQ ID NO: 2056 - DNA, 39 bp, synthetic construct
  source 1..39: mol_type = other DNA
gaacgttatgttgagcagctgaaacaagccctgaaaacc

SEQ ID NO: 2057 - DNA, 39 bp, synthetic construct
  source 1..39: mol_type = other DNA
ctgaaagataagttactgcataaacaattcgcgagccat

SEQ ID NO: 2058 - DNA, 39 bp, synthetic construct
  source 1..39: mol_type = other DNA
aaaaaaagctacgacgaaattgcggagaagctgaatgat

SEQ ID NO: 2059 - DNA, 39 bp, synthetic construct
  source 1..39: mol_type = other DNA
gataatgaaaagaacgaatttcagttagttctgaataaa

SEQ ID NO: 2060 - DNA, 39 bp, synthetic construct
  source 1..39: mol_type = other DNA
caggaagcgatccaagcggcgattaagaaggtggaagat

SEQ ID NO: 2061 - DNA, 39 bp, synthetic construct
  source 1..39: mol_type = other DNA
gaaaaactgacgtctcagatttatgaggagaccgtgaaa

SEQ ID NO: 2062 - DNA, 39 bp, synthetic construct
  source 1..39: mol_type = other DNA
catgatgtgcacacgctggtgctgggtcgcgaaattacc

SEQ ID NO: 2063 - DNA, 39 bp, synthetic construct
  source 1..39: mol_type = other DNA
caggatctgcgcaagaaaattgtggacttacataaaagc

SEQ ID NO: 2064 - DNA, 39 bp, synthetic construct
  source 1..39: mol_type = other DNA
gaacatgtgcgcaaggtgtttgatgagatccagcagaaa

SEQ ID NO: 2065 - DNA, 39 bp, synthetic construct
  source 1..39: mol_type = other DNA
aaagaacagttagccgaactgaaagtttcttatctgaaa

SEQ ID NO: 2066 - DNA, 39 bp, synthetic construct
  source 1..39: mol_type = other DNA
aattggccgaagacgctgaaactggccttagaaaaagaa

SEQ ID NO: 2067 - DNA, 39 bp, synthetic construct
  source 1..39: mol_type = other DNA
acccatggctctcgcatggattttattgttaaggaactg

SEQ ID NO: 2068 - DNA, 39 bp, synthetic construct
  source 1..39: mol_type = other DNA
ctgaccgaattcacgaatgaaaaagacacgctgagcaaa

SEQ ID NO: 2069 - DNA, 39 bp, synthetic construct
  source 1..39: mol_type = other DNA
ctgaattatgttaaggaaaaactggaggaggtgcatagc

SEQ ID NO: 2070 - DNA, 39 bp, synthetic construct
  source 1..39: mol_type = other DNA
gtggaaggcgtttggacgctgaaagatgagatcaaaacc

SEQ ID NO: 2071 - DNA, 39 bp, synthetic construct
  source 1..39: mol_type = other DNA
aatgaagatgttgcccgtaccaaaaagatcattcagcgt

SEQ ID NO: 2072 - DNA, 39 bp, synthetic construct
  source 1..39: mol_type = other DNA
gcggaaaccaagaagctgctggatatcgttgcgcgtagc

SEQ ID NO: 2073 - DNA, 39 bp, synthetic construct
  source 1..39: mol_type = other DNA
gattatattttaaagagcctgctggagtctgcggaaaaa

SEQ ID NO: 2074 - DNA, 39 bp, synthetic construct
  source 1..39: mol_type = other DNA
gatcgtattggtacgcatatgattaattctgccgaaaaa

SEQ ID NO: 2075 - DNA, 39 bp, synthetic construct
  source 1..39: mol_type = other DNA
agcgaagatgttgttgtgagcaaagttggtcgtgatctg

SEQ ID NO: 2076 - DNA, 39 bp, synthetic construct
  source 1..39: mol_type = other DNA
catagcgaaacggttgcgaaacatggtgccaaactgagc

SEQ ID NO: 2077 - DNA, 39 bp, synthetic construct
  source 1..39: mol_type = other DNA
ctggatagcacgttagaagcggtgcgcaaggcgaaagat

SEQ ID NO: 2078 - DNA, 39 bp, synthetic construct
  source 1..39: mol_type = other DNA
gtggaaagcaacttagatgtggtgcgccaaaaactggaa

SEQ ID NO: 2079 - DNA, 39 bp, synthetic construct
  source 1..39: mol_type = other DNA
gaacgtaatacggagaaagtgcgtgactacctggaaagc

SEQ ID NO: 2080 - DNA, 39 bp, synthetic construct
  source 1..39: mol_type = other DNA
aatgatcgtttaatcgcgaccctgaagtctatgcgtgat

SEQ ID NO: 2081 - DNA, 39 bp, synthetic construct
  source 1..39: mol_type = other DNA
aaaagcaccaaccgcgattatctggccgagcgtctgcgt

SEQ ID NO: 2082 - DNA, 39 bp, synthetic construct
  source 1..39: mol_type = other DNA
cgtgaagaatggaagggtggcgcggaaacgaacaaaatt

SEQ ID NO: 2083 - DNA, 39 bp, synthetic construct
  source 1..39: mol_type = other DNA
agcgcggcgatccaccgtctggtggacacgagcgaaaaa

SEQ ID NO: 2084 - DNA, 39 bp, synthetic construct
  source 1..39: mol_type = other DNA
ccgaaagcgggtgacgaatttgtggagaagaccctgagc

SEQ ID NO: 2085 - DNA, 39 bp, synthetic construct
  source 1..39: mol_type = other DNA
accccgcgtaagcgcctgaaagaatctttagatcagatt

SEQ ID NO: 2086 - DNA, 39 bp, synthetic construct
  source 1..39: mol_type = other DNA
gaacatagcgccaagagcctgcgtttattactggcggaa

SEQ ID NO: 2087 - DNA, 39 bp, synthetic construct
  source 1..39: mol_type = other DNA
caggaatttcgcgaggcgattcgtaaggccctgctgacc

SEQ ID NO: 2088 - DNA, 39 bp, synthetic construct
  source 1..39: mol_type = other DNA
accaaagatgccgagaaagtggtgtctgagattaaagcg

SEQ ID NO: 2089 - DNA, 39 bp, synthetic construct
  source 1..39: mol_type = other DNA
ctggaaggcttaaaggatattacccgcgaggtggcgagc

SEQ ID NO: 2090 - DNA, 39 bp, synthetic construct
  source 1..39: mol_type = other DNA
gtgaccgatcgcatcgtgcgtaccttacacgatctgagc

SEQ ID NO: 2091 - DNA, 39 bp, synthetic construct
  source 1..39: mol_type = other DNA
gatagcaaattagttgataaaattgccaacgaaattagc

SEQ ID NO: 2092 - DNA, 39 bp, synthetic construct
  source 1..39: mol_type = other DNA
gaaggccatttatctctgatgcgtctggcccgccagcat

SEQ ID NO: 2093 - DNA, 39 bp, synthetic construct
  source 1..39: mol_type = other DNA
caggaatatgttcgcgaaaccattgacaagctgatggcg

SEQ ID NO: 2094 - DNA, 39 bp, synthetic construct
  source 1..39: mol_type = other DNA
ccgacccgtaaggaggaagtggtgcgcgccctgaataat

SEQ ID NO: 2095 - DNA, 39 bp, synthetic construct
  source 1..39: mol_type = other DNA
agcgcgattaaggacgaactgattaagacgctggatggc

SEQ ID NO: 2096 - DNA, 39 bp, synthetic construct
  source 1..39: mol_type = other DNA
cgtgatgtggacacgaccatggaactgttaaagcgtctg

SEQ ID NO: 2097 - DNA, 39 bp, synthetic construct
  source 1..39: mol_type = other DNA
gtggataccacgcgccatgtggatgttttacatgcgtgg

SEQ ID NO: 2098 - DNA, 39 bp, synthetic construct
  source 1..39: mol_type = other DNA
gaaaaactgaaggagaccgtggtgaaggccgtgagcatt

SEQ ID NO: 2099 - DNA, 39 bp, synthetic construct
  source 1..39: mol_type = other DNA
aaaagccgtttatctcatcagattacgcgcatggaaaat

SEQ ID NO: 2100 - DNA, 39 bp, synthetic construct
  source 1..39: mol_type = other DNA
agccgtctggaggacgcggtgaaaaagacggtggcggaa

SEQ ID NO: 2101 - DNA, 39 bp, synthetic construct
  source 1..39: mol_type = other DNA
agcgtggatacgttagcgaaactggcccgcgaaaaactg

SEQ ID NO: 2102 - DNA, 39 bp, synthetic construct
  source 1..39: mol_type = other DNA
gatgcggataagacgcgttataccgccttaattattaaa

SEQ ID NO: 2103 - DNA, 39 bp, synthetic construct
  source 1..39: mol_type = other DNA
ccggaacaggttatcgcggaagcgatccgcaaaaaaacc

SEQ ID NO: 2104 - DNA, 39 bp, synthetic construct
  source 1..39: mol_type = other DNA
gaaaccaccttaaagcgtctgggcgcctctcatagcaaa

SEQ ID NO: 2105 - DNA, 39 bp, synthetic construct
  source 1..39: mol_type = other DNA
gataccagcaaccgcctgaaacagatcatggccgaacgt

SEQ ID NO: 2106 - DNA, 39 bp, synthetic construct
  source 1..39: mol_type = other DNA
accagcgatgttatcaaagatctgatggagcgcattaaa

SEQ ID NO: 2107 - DNA, 39 bp, synthetic construct
  source 1..39: mol_type = other DNA
ccgcgtcagttaaaggaaattcaggacttcgtgaaagaa

SEQ ID NO: 2108 - DNA, 39 bp, synthetic construct
  source 1..39: mol_type = other DNA
gaaaaagcggcccaaaaagtggtgtctgaggtggaagcg

SEQ ID NO: 2109 - DNA, 39 bp, synthetic construct
  source 1..39: mol_type = other DNA
accaccggcgttcaccgtctgtatcaaatggagaaagat

SEQ ID NO: 2110 - DNA, 39 bp, synthetic construct
  source 1..39: mol_type = other DNA
gatcgtacccaaacggtgctgcgtgacatccgtgatgcg

SEQ ID NO: 2111 - DNA, 39 bp, synthetic construct
  source 1..39: mol_type = other DNA
gatgcgcagaaggagaaatatctgccaaagctggcgacc

SEQ ID NO: 2112 - DNA, 39 bp, synthetic construct
  source 1..39: mol_type = other DNA
cagcatggctctcgctttattcagcaaaagctggaacgt

SEQ ID NO: 2113 - DNA, 39 bp, synthetic construct
  source 1..39: mol_type = other DNA
gaagcggattacatcgaacgtaccgtttctaaagtgatg

SEQ ID NO: 2114 - DNA, 39 bp, synthetic construct
  source 1..39: mol_type = other DNA
ctggataaaatgcaacaatttgtgaccaagttacatcgt

SEQ ID NO: 2115 - DNA, 39 bp, synthetic construct
  source 1..39: mol_type = other DNA
gatctgaaaacgatcaaaaaaaccttacaagaactgctg

SEQ ID NO: 2116 - DNA, 39 bp, synthetic construct
  source 1..39: mol_type = other DNA
cgtgaaaccgttaacaaagcgctggccgactttgcgcat

SEQ ID NO: 2117 - DNA, 39 bp, synthetic construct
  source 1..39: mol_type = other DNA
tgggatcagttattagataatgtggccaagctgaaaaaa

SEQ ID NO: 2118 - DNA, 39 bp, synthetic construct
  source 1..39: mol_type = other DNA
gatgtgccggaggccctgaatcgtacgttaaaagatctg

SEQ ID NO: 2119 - DNA, 39 bp, synthetic construct
  source 1..39: mol_type = other DNA
gaaaaagtggccgaccgtctgaaattccaactgggccag

SEQ ID NO: 2120 - DNA, 39 bp, synthetic construct
  source 1..39: mol_type = other DNA
agcaccgaagttgagctgagcatgaaattacgcgaatat

SEQ ID NO: 2121 - DNA, 39 bp, synthetic construct
  source 1..39: mol_type = other DNA
ccggatctgcacttaaatcgtgcgacgttacataaatat

SEQ ID NO: 2122 - DNA, 39 bp, synthetic construct
  source 1..39: mol_type = other DNA
agcctggaagccaaggcgattgtggacaagaccatggat

SEQ ID NO: 2123 - DNA, 39 bp, synthetic construct
  source 1..39: mol_type = other DNA
gaacatggcaagtctattgtggaacactctaaaaaaatt

SEQ ID NO: 2124 - DNA, 39 bp, synthetic construct
  source 1..39: mol_type = other DNA
gcgcaggatttccgcaaaagcatggaattagcccgtgaa

SEQ ID NO: 2125 - DNA, 39 bp, synthetic construct
  source 1..39: mol_type = other DNA
gaacaggatgttaacgcggcgcatgaccgcctggcgcgt

SEQ ID NO: 2126 - DNA, 39 bp, synthetic construct
  source 1..39: mol_type = other DNA
accgatcagaaggttagcgaagcgaagcgcgcgatgcag

SEQ ID NO: 2127 - DNA, 39 bp, synthetic construct
  source 1..39: mol_type = other DNA
gtgagcaccgttcaacgtagcgtgaagaagctgcatgaa

SEQ ID NO: 2128 - DNA, 39 bp, synthetic construct
  source 1..39: mol_type = other DNA
accgaaaaaacgttaaaactggtgaagcaagcggaaaaa

SEQ ID NO: 2129 - DNA, 39 bp, synthetic construct
  source 1..39: mol_type = other DNA
gaaaaaaccgttgagctgctgcgtaacgttctgaaagaa

SEQ ID NO: 2130 - DNA, 39 bp, synthetic construct
  source 1..39: mol_type = other DNA
attgatgaagcccgccaggaactgcaccgcattattaat

SEQ ID NO: 2131 - DNA, 39 bp, synthetic construct
  source 1..39: mol_type = other DNA
cgtgatgcgcaagccgtgcagcgtcaacgcgtggcggat

SEQ ID NO: 2132 - DNA, 39 bp, synthetic construct
  source 1..39: mol_type = other DNA
acccgtgaaaagttaaatcgtattttatctgaacgtacc

SEQ ID NO: 2133 - DNA, 39 bp, synthetic construct
  source 1..39: mol_type = other DNA
atttttgcgtctcgcaccctgattgaccgcctgaaagaa

SEQ ID NO: 2134 - DNA, 39 bp, synthetic construct
  source 1..39: mol_type = other DNA
gcggatgcgcactctaatctggcgtctatccataaagat

SEQ ID NO: 2135 - DNA, 39 bp, synthetic construct
  source 1..39: mol_type = other DNA
cgtcaggaatacgaggatattgcggttaagctgggcacc

SEQ ID NO: 2136 - DNA, 39 bp, synthetic construct
  source 1..39: mol_type = other DNA
catcatgcgtggcaccgcctgctggatcaagccctgaat

SEQ ID NO: 2137 - DNA, 39 bp, synthetic construct
  source 1..39: mol_type = other DNA
aaaagctataaggagctggtgaccttatctgcggaagaa

SEQ ID NO: 2138 - DNA, 39 bp, synthetic construct
  source 1..39: mol_type = other DNA
ccgagccgtgaccgcctgctggcgcacttaggcaccgaa

SEQ ID NO: 2139 - DNA, 39 bp, synthetic construct
  source 1..39: mol_type = other DNA
accgaaaaagcctgggaggtgctgaccaaggcccgtgcg

SEQ ID NO: 2140 - DNA, 39 bp, synthetic construct
  source 1..39: mol_type = other DNA
gaatatcgtaagaagctgatggatggcttaacgaatcag

SEQ ID NO: 2141 - DNA, 39 bp, synthetic construct
  source 1..39: mol_type = other DNA
aaagataaattaaagaatctgatttggatccacgaaaat

SEQ ID NO: 2142 - DNA, 39 bp, synthetic construct
  source 1..39: mol_type = other DNA
gaacagtatcgcgagccgctgcgtaacgccctgaaagat

SEQ ID NO: 2143 - DNA, 39 bp, synthetic construct
  source 1..39: mol_type = other DNA
aatgaagaaaagtcttataaaattccacgcgtgaatagc

SEQ ID NO: 2144 - DNA, 39 bp, synthetic construct
  source 1..39: mol_type = other DNA
gaaagcaatttaaagcgtctgggcgccatccattttaaa

SEQ ID NO: 2145 - DNA, 39 bp, synthetic construct
  source 1..39: mol_type = other DNA
gaacagctggcccgcaaagcggaagcccaagcgaaaaaa

SEQ ID NO: 2146 - DNA, 39 bp, synthetic construct
  source 1..39: mol_type = other DNA
atgggccatgccgagaaaattgcgtctgagctgaaaacc

SEQ ID NO: 2147 - DNA, 39 bp, synthetic construct
  source 1..39: mol_type = other DNA
caggaagatacgttcgcggcggaattacaccgtctgaaa

SEQ ID NO: 2148 - DNA, 39 bp, synthetic construct
  source 1..39: mol_type = other DNA
ctggaaaccaacttacgtaaactgttcgacaaactgctg

SEQ ID NO: 2149 - DNA, 39 bp, synthetic construct
  source 1..39: mol_type = other DNA
attaaagaaacgcaagaaatggtggatttctctattaaa

SEQ ID NO: 2150 - DNA, 39 bp, synthetic construct
  source 1..39: mol_type = other DNA
gaaagcaccttatacccgattctgaagaagctggaaaaa

SEQ ID NO: 2151 - DNA, 39 bp, synthetic construct
  source 1..39: mol_type = other DNA
ctgaaagaagttgagaccagcctgtctcgctttgaacag

SEQ ID NO: 2152 - DNA, 39 bp, synthetic construct
  source 1..39: mol_type = other DNA
gaacaggtggccaaggaagcgcagaagatcctgaccaaa

SEQ ID NO: 2153 - DNA, 39 bp, synthetic construct
  source 1..39: mol_type = other DNA
gaaaaagaaggtttagaagtgctgtctgccattcgtaat

SEQ ID NO: 2154 - DNA, 39 bp, synthetic construct
  source 1..39: mol_type = other DNA
gaacgtgtgaaggagaccctgcgtacggttaaaaaagat

SEQ ID NO: 2155 - DNA, 39 bp, synthetic construct
  source 1..39: mol_type = other DNA
gaaagcggccaaaaggaactgcagatccgctatgaaaaa

SEQ ID NO: 2156 - DNA, 39 bp, synthetic construct
  source 1..39: mol_type = other DNA
gaaaaaagcttacgcaccatggatcgtttagttcgtgcg

SEQ ID NO: 2157 - DNA, 39 bp, synthetic construct
  source 1..39: mol_type = other DNA
cagaaagatcgcgacatttttgtgaagaaggcggaaagc

SEQ ID NO: 2158 - DNA, 39 bp, synthetic construct
  source 1..39: mol_type = other DNA
gcgaaagaattagccgaactggcgaaccgcgcggaaagc

SEQ ID NO: 2159 - DNA, 39 bp, synthetic construct
  source 1..39: mol_type = other DNA
accagcaccatcttacgtgaagtggagttactgaaaaaa

SEQ ID NO: 2160 - DNA, 39 bp, synthetic construct
  source 1..39: mol_type = other DNA
caggatgaacgcgacattgcggcgacggttcgtcagttt

SEQ ID NO: 2161 - DNA, 39 bp, synthetic construct
  source 1..39: mol_type = other DNA
cgtaccgcgcacaacgcgcgtgaaaagttagcggaaagc

SEQ ID NO: 2162 - DNA, 39 bp, synthetic construct
  source 1..39: mol_type = other DNA
gtgaaagaagccaagcagattgtgaaggactggaaaagc

SEQ ID NO: 2163 - DNA, 39 bp, synthetic construct
  source 1..39: mol_type = other DNA
gataccaccaagaagattattgatgaggccctgtatcat

SEQ ID NO: 2164 - DNA, 39 bp, synthetic construct
  source 1..39: mol_type = other DNA
accagcgaagccgttgaactggcgaagcacgcggaaaaa

SEQ ID NO: 2165 - DNA, 39 bp, synthetic construct
  source 1..39: mol_type = other DNA
tatgaagtgaagcgcgcgcgtgaattaaaccagctgctg

SEQ ID NO: 2166 - DNA, 39 bp, synthetic construct
  source 1..39: mol_type = other DNA
agcgaagtgaaggcctatgaaaccaaggttgcggtggaa

SEQ ID NO: 2167 - DNA, 39 bp, synthetic construct
  source 1..39: mol_type = other DNA
gtgtgggcgttagacagcgaagtgaagtctctgcatcgt

SEQ ID NO: 2168 - DNA, 39 bp, synthetic construct
  source 1..39: mol_type = other DNA
gaagaaaatcgcaaggcgtttgaaaaggccctggaaacc

SEQ ID NO: 2169 - DNA, 39 bp, synthetic construct
  source 1..39: mol_type = other DNA
gatcagattgttaacaataaagtgaagaagggcctggaa

SEQ ID NO: 2170 - DNA, 39 bp, synthetic construct
  source 1..39: mol_type = other DNA
gatggcctgatcgccgaacgtcagaagttactggatagc

SEQ ID NO: 2171 - DNA, 39 bp, synthetic construct
  source 1..39: mol_type = other DNA
cagacccatgccaagcgtgcgtatcgcgagctggtgctg

SEQ ID NO: 2172 - DNA, 39 bp, synthetic construct
  source 1..39: mol_type = other DNA
ccgcaggaaaagttaaaaaccgtgaaggagaattggaaa

SEQ ID NO: 2173 - DNA, 39 bp, synthetic construct
  source 1..39: mol_type = other DNA
agcgaaaaattcttaaatgatctggttgacagcatgaaa

SEQ ID NO: 2174 - DNA, 39 bp, synthetic construct
  source 1..39: mol_type = other DNA
ccggcgaatttcgaggcgcagatgaaacacttaaaagat

SEQ ID NO: 2175 - DNA, 39 bp, synthetic construct
  source 1..39: mol_type = other DNA
catggcgaatctttacgtgtgcatgccttagcggaaagc

SEQ ID NO: 2176 - DNA, 39 bp, synthetic construct
  source 1..39: mol_type = other DNA
cgtgaaaccgttacgaaagtgattggtgagctggcgcgt

SEQ ID NO: 2177 - DNA, 39 bp, synthetic construct
  source 1..39: mol_type = other DNA
ctggcggatttccgccagaccattgacaaggtggatgcg

SEQ ID NO: 2178 - DNA, 39 bp, synthetic construct
  source 1..39: mol_type = other DNA
aaaccggaaatccgcgcgctgaatgagttagcggatagc

SEQ ID NO: 2179 - DNA, 39 bp, synthetic construct
  source 1..39: mol_type = other DNA
cgtgcggatgttaagagcgtgatggattctttaattcgt

SEQ ID NO: 2180 - DNA, 39 bp, synthetic construct
  source 1..39: mol_type = other DNA
cagcgtcgtatcaagaaagtgacccacgacatggatatg

SEQ ID NO: 2181 - DNA, 39 bp, synthetic construct
  source 1..39: mol_type = other DNA
cgtgaactggttaagaaagtgagcgacgttatttggaat

SEQ ID NO: 2182 - DNA, 39 bp, synthetic construct
  source 1..39: mol_type = other DNA
gtgcagaccttacgcgaacgtctgatcgacgcgctggaa

SEQ ID NO: 2183 - DNA, 39 bp, synthetic construct
  source 1..39: mol_type = other DNA
gatgtgcgtacggagcgtctgcgtgaccgcattacccag

SEQ ID NO: 2184 - DNA, 39 bp, synthetic construct
  source 1..39: mol_type = other DNA
ctgagcaccgcccaaaaaattattaaggaggcgcgtgat

SEQ ID NO: 2185 - DNA, 39 bp, synthetic construct
  source 1..39: mol_type = other DNA
gaagtgagctctcgcgtggtgcatgccatcaaagaagcg

SEQ ID NO: 2186 - DNA, 39 bp, synthetic construct
  source 1..39: mol_type = other DNA
agccgtgtgtctcgctttgcggatttatctaaagaagtg

SEQ ID NO: 2187 - DNA, 39 bp, synthetic construct
  source 1..39: mol_type = other DNA
gaaaaagtggagtctgaaattaaaaaggttgaaaatttt

SEQ ID NO: 2188 - DNA, 39 bp, synthetic construct
  source 1..39: mol_type = other DNA
gaagatcgtttaaaccagattgtgcaagagctgcgtggc

SEQ ID NO: 2189 - DNA, 39 bp, synthetic construct
  source 1..39: mol_type = other DNA
cgtattcgtgacgaggtgtttaaagttttacagcagcat

SEQ ID NO: 2190 - DNA, 39 bp, synthetic construct
  source 1..39: mol_type = other DNA
ccggcgaccgttgaccgtacccatgccttaatgcgtaaa

SEQ ID NO: 2191 - DNA, 39 bp, synthetic construct
  source 1..39: mol_type = other DNA
agcaaagtgatcatcgatcgtgtgacggagtatctggaa

SEQ ID NO: 2192 - DNA, 39 bp, synthetic construct
  source 1..39: mol_type = other DNA
aaaagcgcgaagtctctgaaaccgttattcgatgaactg

SEQ ID NO: 2193 - DNA, 39 bp, synthetic construct
  source 1..39: mol_type = other DNA
gtggataaacgcaacgaaaccaccttaaagctgattaaa

SEQ ID NO: 2194 - DNA, 39 bp, synthetic construct
  source 1..39: mol_type = other DNA
aaagaaaccttattagcggatatgcgtcaagccgaacgt

SEQ ID NO: 2195 - DNA, 39 bp, synthetic construct
  source 1..39: mol_type = other DNA
atggatattcaagcccgtattaaattcgagaccgaaggc

SEQ ID NO: 2196 - DNA, 39 bp, synthetic construct
  source 1..39: mol_type = other DNA
gtgaaaagctacgacgaaattattaagaagctgagcgat

SEQ ID NO: 2197 - DNA, 39 bp, synthetic construct
  source 1..39: mol_type = other DNA
aaagataccgttgagaaagtgcgtcaaacgtttgaaaat

SEQ ID NO: 2198 - DNA, 39 bp, synthetic construct
  source 1..39: mol_type = other DNA
gatgaagtgtctacgaaaattctgatggagttcaataaa

SEQ ID NO: 2199 - DNA, 39 bp, synthetic construct
  source 1..39: mol_type = other DNA
tttgataccgttgccgataaaattcactctgtgagccgt

SEQ ID NO: 2200 - DNA, 39 bp, synthetic construct
  source 1..39: mol_type = other DNA
gaaaatgtgttagaggcggcgcgtcacttacatcagacc

SEQ ID NO: 2201 - DNA, 39 bp, synthetic construct
  source 1..39: mol_type = other DNA
cgtgataaagttaacgatattgtggaccaagtgattacc

SEQ ID NO: 2202 - DNA, 39 bp, synthetic construct
  source 1..39: mol_type = other DNA
cgtgaacgtgttgccagcctgctgaaggagcgtctgacc

SEQ ID NO: 2203 - DNA, 39 bp, synthetic construct
  source 1..39: mol_type = other DNA
gtggataaacgcaacgaaaccaccttacgcctgattaaa

SEQ ID NO: 2204 - DNA, 39 bp, synthetic construct
  source 1..39: mol_type = other DNA
gaaagcctggttgagaaagtgaaagagttcctgagcacc

SEQ ID NO: 2205 - DNA, 39 bp, synthetic construct
  source 1..39: mol_type = other DNA
ccggataaagttaaggaatttgcgcaacgcattaccgcg

SEQ ID NO: 2206 - DNA, 39 bp, synthetic construct
  source 1..39: mol_type = other DNA
ggcgaagcgaacgttaaaaaagaaatccaactgctgcgt

SEQ ID NO: 2207 - DNA, 39 bp, synthetic construct
  source 1..39: mol_type = other DNA
cgtatgcgtgagcaactgaattttttagccgaagaactg

SEQ ID NO: 2208 - DNA, 39 bp, synthetic construct
  source 1..39: mol_type = other DNA
gaaaaaaccttacgcgataaactggttttagcgaccgaa

SEQ ID NO: 2209 - DNA, 39 bp, synthetic construct
  source 1..39: mol_type = other DNA
ccggatgcgacggccgaaaccaaagccttactgcatcgt

SEQ ID NO: 2210 - DNA, 39 bp, synthetic construct
  source 1..39: mol_type = other DNA
gaaagcgcggttacggattttgcggcccgcctgcgtgaa

SEQ ID NO: 2211 - DNA, 39 bp, synthetic construct
  source 1..39: mol_type = other DNA
attaccaaacacatggagcgttatctggacatcctgaat

SEQ ID NO: 2212 - DNA, 39 bp, synthetic construct
  source 1..39: mol_type = other DNA
caggaatttcgcgaggcgattcgtaaggccctggtgagc

SEQ ID NO: 2213 - DNA, 39 bp, synthetic construct
  source 1..39: mol_type = other DNA
gataataaattaaacgaaattggcgagaagtataaaaaa

SEQ ID NO: 2214 - DNA, 39 bp, synthetic construct
  source 1..39: mol_type = other DNA
cgtgtgaccgttacgcgtctgctgggtgacctgcgtgaa

SEQ ID NO: 2215 - DNA, 39 bp, synthetic construct
  source 1..39: mol_type = other DNA
gcgcagcgtttacacgaaattcgtacgcaactggtggaa

SEQ ID NO: 2216 - DNA, 39 bp, synthetic construct
  source 1..39: mol_type = other DNA
ggcctggatcgcaaggaagtgcagcaattaaccgtgaaa

SEQ ID NO: 2217 - DNA, 39 bp, synthetic construct
  source 1..39: mol_type = other DNA
accattgataaggttagcgatattgttaaggaaaaactg

SEQ ID NO: 2218 - DNA, 39 bp, synthetic construct
  source 1..39: mol_type = other DNA
gcggtgctgaaggaccgtgtgagccgcaacagcgcggat

SEQ ID NO: 2219 - DNA, 39 bp, synthetic construct
  source 1..39: mol_type = other DNA
ccgaaagcgcgccaagaagtggatcaccactggcaggcg

SEQ ID NO: 2220 - DNA, 39 bp, synthetic construct
  source 1..39: mol_type = other DNA
aaagcgcattctatccgtctgcgtgccttagcgcaggaa

SEQ ID NO: 2221 - DNA, 39 bp, synthetic construct
  source 1..39: mol_type = other DNA
accgcgatgctgaaggacaccaccgaattattaaaaaaa

SEQ ID NO: 2222 - DNA, 39 bp, synthetic construct
  source 1..39: mol_type = other DNA
aaagatatgaaaaaggccgtgatggcgtttcaagaccag

SEQ ID NO: 2223 - DNA, 39 bp, synthetic construct
  source 1..39: mol_type = other DNA
accagcctgatcaagctggtgaaagacaagattcgtgaa

SEQ ID NO: 2224 - DNA, 39 bp, synthetic construct
  source 1..39: mol_type = other DNA
aaagatgtgcaaaagaccctgcagaacgacgtggataat

SEQ ID NO: 2225 - DNA, 39 bp, synthetic construct
  source 1..39: mol_type = other DNA
accgtgagcttaacgaaaaaaattaaggaggcggtggat

SEQ ID NO: 2226 - DNA, 39 bp, synthetic construct
  source 1..39: mol_type = other DNA
gatagcgatatcaaccgtggcattgccaaggcgctgaaa

SEQ ID NO: 2227 - DNA, 39 bp, synthetic construct
  source 1..39: mol_type = other DNA
ggcgaagaattatctcatctgaaaaaggccctgaccatt

SEQ ID NO: 2228 - DNA, 39 bp, synthetic construct
  source 1..39: mol_type = other DNA
aatgaagatttcgttcgtctgagcacggaggcgcgtaaa

SEQ ID NO: 2229 - DNA, 39 bp, synthetic construct
  source 1..39: mol_type = other DNA
gatgatattgttgagcagcagaaaccaatcgcgattaaa

SEQ ID NO: 2230 - DNA, 39 bp, synthetic construct
  source 1..39: mol_type = other DNA
gaagtgattacgtctgcgatggcgaaaaaggcccatgaa

SEQ ID NO: 2231 - DNA, 39 bp, synthetic construct
  source 1..39: mol_type = other DNA
agcgatctggttgaccagggcaaagagcgcctgaatcgt

SEQ ID NO: 2232 - DNA, 39 bp, synthetic construct
  source 1..39: mol_type = other DNA
agccatcgtgagatgacgagcaaactgttatctgatctg

SEQ ID NO: 2233 - DNA, 39 bp, synthetic construct
  source 1..39: mol_type = other DNA
ctggcggaattaaagagctatcatcaagcccataaagcg

SEQ ID NO: 2234 - DNA, 39 bp, synthetic construct
  source 1..39: mol_type = other DNA
aaaaccaaatctgttgcggaaattatccgcgatgaattt

SEQ ID NO: 2235 - DNA, 39 bp, synthetic construct
  source 1..39: mol_type = other DNA
agcctgacccacgcctttaaactgttagacaaaattgat

SEQ ID NO: 2236 - DNA, 39 bp, synthetic construct
  source 1..39: mol_type = other DNA
gcgagccaggttgagaaagatagcgacttaaatcagaaa

SEQ ID NO: 2237 - DNA, 39 bp, synthetic construct
  source 1..39: mol_type = other DNA
gaagcggaaacgcgcgcgaccgtgcaaaagtataaaacc

SEQ ID NO: 2238 - DNA, 39 bp, synthetic construct
  source 1..39: mol_type = other DNA
gataccgtgtacaagaaactggtgcaacgcgaaaaaacc

SEQ ID NO: 2239 - DNA, 39 bp, synthetic construct
  source 1..39: mol_type = other DNA
aaagaaagcttagaggcgctggatgccgccaaaaccgcg

SEQ ID NO: 2240 - DNA, 39 bp, synthetic construct
  source 1..39: mol_type = other DNA
cgtgaaaccgttcgccaggcgctgcgcgagctgctgatt

SEQ ID NO: 2241 - DNA, 39 bp, synthetic construct
  source 1..39: mol_type = other DNA
gtgcagaaagacttagaacgtctgacgcaagaacgtatt

SEQ ID NO: 2242 - DNA, 39 bp, synthetic construct
  source 1..39: mol_type = other DNA
accaccgatgttgagaaaagctttgacaagctgctgaaa

SEQ ID NO: 2243 - DNA, 39 bp, synthetic construct
  source 1..39: mol_type = other DNA
gatcgtgcgttaacggcggcggtgaagatcagcgaacgt

SEQ ID NO: 2244 - DNA, 39 bp, synthetic construct
  source 1..39: mol_type = other DNA
gtggaatttgttaagcatgaactgaaccgcctgctgagc

SEQ ID NO: 2245 - DNA, 39 bp, synthetic construct
  source 1..39: mol_type = other DNA
accgcgaaagacatcgcggaagcgcaaaagatgctggat

SEQ ID NO: 2246 - DNA, 39 bp, synthetic construct
  source 1..39: mol_type = other DNA
ccggaagatgttttaaaaaccgcgatcaagaccgtggaa

SEQ ID NO: 2247 - DNA, 39 bp, synthetic construct
  source 1..39: mol_type = other DNA
caggaagtggaggttgcgaaaagcatcgccgaaaaactg

SEQ ID NO: 2248 - DNA, 39 bp, synthetic construct
  source 1..39: mol_type = other DNA
cgtgaaaccgtttctcgtgtgctgcacgccctggcggaa

SEQ ID NO: 2249 - DNA, 39 bp, synthetic construct
  source 1..39: mol_type = other DNA
ctgaaagatatctctattattatttctcactttgataaa

SEQ ID NO: 2250 - DNA, 39 bp, synthetic construct
  source 1..39: mol_type = other DNA
caggcgaccgttcaaaaaattcgtgacgccattcgtgat

SEQ ID NO: 2251 - DNA, 39 bp, synthetic construct
  source 1..39: mol_type = other DNA
gcggaaaaagttgacgcgattaatgacgttctgcgtagc

SEQ ID NO: 2252 - DNA, 39 bp, synthetic construct
  source 1..39: mol_type = other DNA
gcggatattcgcaaggaagtggaacaaatcgataaaagc

SEQ ID NO: 2253 - DNA, 39 bp, synthetic construct
  source 1..39: mol_type = other DNA
ctgaaaagccaccaagtgcgtctggttttagcggaaaaa

SEQ ID NO: 2254 - DNA, 39 bp, synthetic construct
  source 1..39: mol_type = other DNA
gatgcggatatcttaagctgggcgaatcgcaaggtgcgt

SEQ ID NO: 2255 - DNA, 39 bp, synthetic construct
  source 1..39: mol_type = other DNA
caggaaaccatcaagcatgtgaaagacttaattgcggaa

SEQ ID NO: 2256 - DNA, 39 bp, synthetic construct
  source 1..39: mol_type = other DNA
gaaaaaattcaaaaggaagcgcaggaggccctggaaaaa

SEQ ID NO: 2257 - DNA, 39 bp, synthetic construct
  source 1..39: mol_type = other DNA
gaagcgcgtgttcgcaatcagtttttaaaggaaatggat

SEQ ID NO: 2258 - DNA, 39 bp, synthetic construct
  source 1..39: mol_type = other DNA
gaaaaagcgatcttaaatgtgaccaaggagtggaaaaaa

SEQ ID NO: 2259 - DNA, 39 bp, synthetic construct
  source 1..39: mol_type = other DNA
catagccagtaccgcgaagaagcgttattaaatcgtctg

SEQ ID NO: 2260 - DNA, 39 bp, synthetic construct
  source 1..39: mol_type = other DNA
attccggatgccgagcgtattctgaagacgctggaaacc

SEQ ID NO: 2261 - DNA, 39 bp, synthetic construct
  source 1..39: mol_type = other DNA
accgaaaaatctaaggaactggcggagatcgtggtgcag

SEQ ID NO: 2262 - DNA, 39 bp, synthetic construct
  source 1..39: mol_type = other DNA
cgtaaagatcgcgacaccgcgcgtcaattacatgaagtg

SEQ ID NO: 2263 - DNA, 39 bp, synthetic construct
  source 1..39: mol_type = other DNA
gtgaaagaacaagagtggagcatggcggtggagcgcggc

SEQ ID NO: 2264 - DNA, 39 bp, synthetic construct
  source 1..39: mol_type = other DNA
acccgtacccgcttaagctttgaaaaggccgcgcgtgaa

SEQ ID NO: 2265 - DNA, 39 bp, synthetic construct
  source 1..39: mol_type = other DNA
cgtaaaagcgccgacaaagcgctggaggtttataaaagc

SEQ ID NO: 2266 - DNA, 39 bp, synthetic construct
  source 1..39: mol_type = other DNA
tttaataccttaaagaataatatgaaagacatccatgat

SEQ ID NO: 2267 - DNA, 39 bp, synthetic construct
  source 1..39: mol_type = other DNA
gatgcgcattctatccgtctgcgtgccttagcgcaggaa

SEQ ID NO: 2268 - DNA, 39 bp, synthetic construct
  source 1..39: mol_type = other DNA
gatgcgacccgcgagcgtattaaatctgccgcgacccgt

SEQ ID NO: 2269 - DNA, 39 bp, synthetic construct
  source 1..39: mol_type = other DNA
agcaaagcgaaggaccgtgtgatggatatcgcccgtacc

SEQ ID NO: 2270 - DNA, 39 bp, synthetic construct
  source 1..39: mol_type = other DNA
agcgaaatggcgttaaagtggattaccaaaggtgagaaa

SEQ ID NO: 2271 - DNA, 39 bp, synthetic construct
  source 1..39: mol_type = other DNA
attacccgtgactctgtgattcgtatcgccaaagatctg

SEQ ID NO: 2272 - DNA, 39 bp, synthetic construct
  source 1..39: mol_type = other DNA
gaaaatgaagttggtgtggcgattcaagagaaactgcgt

SEQ ID NO: 2273 - DNA, 39 bp, synthetic construct
  source 1..39: mol_type = other DNA
gataatgtgacgaaggatgtgtttgccgacctgaatcgt

SEQ ID NO: 2274 - DNA, 39 bp, synthetic construct
  source 1..39: mol_type = other DNA
aaaaccctgaagaagattgcggaaaaggttgaaagcgaa

SEQ ID NO: 2275 - DNA, 39 bp, synthetic construct
  source 1..39: mol_type = other DNA
atgaaagaaacgcaagaaatgattgatttcgccgcgaaa

SEQ ID NO: 2276 - DNA, 39 bp, synthetic construct
  source 1..39: mol_type = other DNA
gaagcgcagaaggagaaatatctgccaaagctgattagc

SEQ ID NO: 2277 - DNA, 39 bp, synthetic construct
  source 1..39: mol_type = other DNA
gtgcaggaaggtgttgataaaattcgccactttcaggaa

SEQ ID NO: 2278 - DNA, 39 bp, synthetic construct
  source 1..39: mol_type = other DNA
cagatgctggagaagaatgcgcgtgaggccgtgaaagaa

SEQ ID NO: 2279 - DNA, 39 bp, synthetic construct
  source 1..39: mol_type = other DNA
cgtgcggaagttgttcagcagctggagaaggaactgttt

SEQ ID NO: 2280 - DNA, 39 bp, synthetic construct
  source 1..39: mol_type = other DNA
gataaagaacgctctattattagcgacatctttagccat

SEQ ID NO: 2281 - DNA, 39 bp, synthetic construct
  source 1..39: mol_type = other DNA
gatcgtaatgacttaattacctatttaaagaaagcgacc

SEQ ID NO: 2282 - DNA, 39 bp, synthetic construct
  source 1..39: mol_type = other DNA
gatcagcagaagaagaaatatctgggtcgcatgaccgaa

SEQ ID NO: 2283 - DNA, 39 bp, synthetic construct
  source 1..39: mol_type = other DNA
gcggaagcggacaaggcgattcagcgctacgaaagcctg

SEQ ID NO: 2284 - DNA, 39 bp, synthetic construct
  source 1..39: mol_type = other DNA
aaagcgaatcgcgagaaaatgacccagatcatgttcgaa

SEQ ID NO: 2285 - DNA, 39 bp, synthetic construct
  source 1..39: mol_type = other DNA
cgtaaaattacggacgatctggtgaagaacgtggaaaaa

SEQ ID NO: 2286 - DNA, 39 bp, synthetic construct
  source 1..39: mol_type = other DNA
atgattggcgaggagaccaaagcgcaaatcctggataaa

SEQ ID NO: 2287 - DNA, 39 bp, synthetic construct
  source 1..39: mol_type = other DNA
gaacagattgccaaggaagcgctgaaggttctgaccaaa

SEQ ID NO: 2288 - DNA, 39 bp, synthetic construct
  source 1..39: mol_type = other DNA
gaaaaactggttaagaatctgtttcaattagcgcgtgaa

SEQ ID NO: 2289 - DNA, 39 bp, synthetic construct
  source 1..39: mol_type = other DNA
cgtcaggcgttaggtgaagcgcgtgaggttattaaaaat

SEQ ID NO: 2290 - DNA, 39 bp, synthetic construct
  source 1..39: mol_type = other DNA
caggtgaccaaggacgcggcggaagccatcaaaaaacat

SEQ ID NO: 2291 - DNA, 39 bp, synthetic construct
  source 1..39: mol_type = other DNA
aatgaacaggttgccgaaaaagtgaaggttgcgattgat

SEQ ID NO: 2292 - DNA, 39 bp, synthetic construct
  source 1..39: mol_type = other DNA
tatgataaaacgacggaagtgattatccgcgatattcgt

SEQ ID NO: 2293 - DNA, 39 bp, synthetic construct
  source 1..39: mol_type = other DNA
agcgatgaagttcgcaaaaatctgatggacatgttccgt

SEQ ID NO: 2294 - DNA, 39 bp, synthetic construct
  source 1..39: mol_type = other DNA
gtggaaaccggtaagaaagtggtggagttaagcgaaaaa

SEQ ID NO: 2295 - DNA, 39 bp, synthetic construct
  source 1..39: mol_type = other DNA
cgtaaaaatgttgagtatctggaaaagttacgtgaaagc

SEQ ID NO: 2296 - DNA, 39 bp, synthetic construct
  source 1..39: mol_type = other DNA
ctgctgcgtgagacgaaagtgggcgttgaggtgaataaa

SEQ ID NO: 2297 - DNA, 39 bp, synthetic construct
  source 1..39: mol_type = other DNA
ccgcgtacccgcgaggtgctgaaagagtggatcgcgagc

SEQ ID NO: 2298 - DNA, 39 bp, synthetic construct
  source 1..39: mol_type = other DNA
agcaaagcggttaaggaagcgtatgagaacgcgcagaaa

SEQ ID NO: 2299 - DNA, 39 bp, synthetic construct
  source 1..39: mol_type = other DNA
atggaaagcaaggcccgtctgctgtctttagtgaaagat

SEQ ID NO: 2300 - DNA, 39 bp, synthetic construct
  source 1..39: mol_type = other DNA
gaagaaacccgcaacgcggtgtgggcggccatcaaagaa

SEQ ID NO: 2301 - DNA, 39 bp, synthetic construct
  source 1..39: mol_type = other DNA
cagcatggctctcgctttattcagttaaagctggaacgt

SEQ ID NO: 2302 - DNA, 39 bp, synthetic construct
  source 1..39: mol_type = other DNA
gatgaacgtatggcccaatttaccgcgcgcttaaatgaa

SEQ ID NO: 2303 - DNA, 39 bp, synthetic construct
  source 1..39: mol_type = other DNA
gaacatgtgcaacgcctgctgctgtcttctcgtgaagcg

SEQ ID NO: 2304 - DNA, 39 bp, synthetic construct
  source 1..39: mol_type = other DNA
aaaaatgaattagttcagaaagcgaagttagcggaacag

SEQ ID NO: 2305 - DNA, 39 bp, synthetic construct
  source 1..39: mol_type = other DNA
gcggcggatcgcgacggcctgcgtgcccaatggcagcgt

SEQ ID NO: 2306 - DNA, 39 bp, synthetic construct
  source 1..39: mol_type = other DNA
gatcgtattggtttcagcatgattagcgacgccgaaaaa

SEQ ID NO: 2307 - DNA, 39 bp, synthetic construct
  source 1..39: mol_type = other DNA
gatgaagatgttcgcgaaaaactgcaagccagcctgaaa

SEQ ID NO: 2308 - DNA, 39 bp, synthetic construct
  source 1..39: mol_type = other DNA
aaagaaaataagaagtttctgctggacttaatgctgaat

SEQ ID NO: 2309 - DNA, 39 bp, synthetic construct
  source 1..39: mol_type = other DNA
gtgaaagaattagaggcgtataccgacgccattcagcgt

SEQ ID NO: 2310 - DNA, 39 bp, synthetic construct
  source 1..39: mol_type = other DNA
aaagcgaaaatcgacccgattctggaggcccgtcagaat

SEQ ID NO: 2311 - DNA, 39 bp, synthetic construct
  source 1..39: mol_type = other DNA
tgggaaagcgccgagaaagtggtgaagacgctgctgaaa

SEQ ID NO: 2312 - DNA, 39 bp, synthetic construct
  source 1..39: mol_type = other DNA
attcaggaaatcgacaaagcgattaagaaggcggcgcag

SEQ ID NO: 2313 - DNA, 39 bp, synthetic construct
  source 1..39: mol_type = other DNA
gcggaaaccatcaaggaactggcgcgcttatttgaaagc

SEQ ID NO: 2314 - DNA, 39 bp, synthetic construct
  source 1..39: mol_type = other DNA
ccgaccaaattcgccgaaattgtggaggagaatctgaaa

SEQ ID NO: 2315 - DNA, 39 bp, synthetic construct
  source 1..39: mol_type = other DNA
accgatattgttgaggcggtggcggagcgcctgcagcgt

SEQ ID NO: 2316 - DNA, 39 bp, synthetic construct
  source 1..39: mol_type = other DNA
agcaaagaaatcgttaccctggtggaggactttcatcgt

SEQ ID NO: 2317 - DNA, 39 bp, synthetic construct
  source 1..39: mol_type = other DNA
gatagcggccgcgagaccgtgcgtgccgccctgaaacat

SEQ ID NO: 2318 - DNA, 39 bp, synthetic construct
  source 1..39: mol_type = other DNA
aaagcggatttacgcgaagcgattcaaacgatgctggat

SEQ ID NO: 2319 - DNA, 39 bp, synthetic construct
  source 1..39: mol_type = other DNA
accctggaattaacgcgtcaggtgaaggagaaactggcg

SEQ ID NO: 2320 - DNA, 39 bp, synthetic construct
  source 1..39: mol_type = other DNA
aaacagtatttagagctgatgcagaaagttttagatgaa

SEQ ID NO: 2321 - DNA, 39 bp, synthetic construct
  source 1..39: mol_type = other DNA
ctggatctgacgaagattctgagcaagaagtataaagaa

SEQ ID NO: 2322 - DNA, 39 bp, synthetic construct
  source 1..39: mol_type = other DNA
gtggatcaggccaagcgtattgcggacgagctgattagc

SEQ ID NO: 2323 - DNA, 39 bp, synthetic construct
  source 1..39: mol_type = other DNA
gcggcgcagatcaagaaactgaaagaggccattgatagc

SEQ ID NO: 2324 - DNA, 39 bp, synthetic construct
  source 1..39: mol_type = other DNA
gaaaaagaagccaaggatagcgcgatcacgtttattcag

SEQ ID NO: 2325 - DNA, 39 bp, synthetic construct
  source 1..39: mol_type = other DNA
gatgcgcagcgccaagcgaccaaagacgccggccgtatt

SEQ ID NO: 2326 - DNA, 39 bp, synthetic construct
  source 1..39: mol_type = other DNA
aaacagcagttcttaaaagtgctgaaggaggcggaaagc

SEQ ID NO: 2327 - DNA, 39 bp, synthetic construct
  source 1..39: mol_type = other DNA
accctgaaagttttacgtcatcatcaagagaaactggaa

SEQ ID NO: 2328 - DNA, 39 bp, synthetic construct
  source 1..39: mol_type = other DNA
accaaaattgccgagaaaattgatgagttcctggcgacc

SEQ ID NO: 2329 - DNA, 39 bp, synthetic construct
  source 1..39: mol_type = other DNA
gaaaaactggccttagatctgctggagcaaattaaaaat

SEQ ID NO: 2330 - DNA, 39 bp, synthetic construct
  source 1..39: mol_type = other DNA
gatatttttaacaagaatctgcgtgcccacgcgctggaa

SEQ ID NO: 2331 - DNA, 39 bp, synthetic construct
  source 1..39: mol_type = other DNA
attcaggaaatcgttgataaagtgaagccacagctggaa

SEQ ID NO: 2332 - DNA, 39 bp, synthetic construct
  source 1..39: mol_type = other DNA
atgaaacagtacttaaaaaccaaattattagaagaagtg

SEQ ID NO: 2333 - DNA, 39 bp, synthetic construct
  source 1..39: mol_type = other DNA
ctggaagaattattcagcaaaattaagaacaccctgaaa

SEQ ID NO: 2334 - DNA, 39 bp, synthetic construct
  source 1..39: mol_type = other DNA
cgtgatgaagttttagcgcagctggagaagagcctgaaa

SEQ ID NO: 2335 - DNA, 39 bp, synthetic construct
  source 1..39: mol_type = other DNA
caggaaacccgcaagaaaaccatggtggacttagaaacc

SEQ ID NO: 2336 - DNA, 39 bp, synthetic construct
  source 1..39: mol_type = other DNA
acctgggtgcgcgacgtggtgcgttctatggaccgtaaa

SEQ ID NO: 2337 - DNA, 39 bp, synthetic construct
  source 1..39: mol_type = other DNA
gatatttttaacaagaatatgcgtgcgcacgccctggaa

SEQ ID NO: 2338 - DNA, 39 bp, synthetic construct
  source 1..39: mol_type = other DNA
ctgcgtaaaacggccgatgattttttaaaccgtattgcg

SEQ ID NO: 2339 - DNA, 39 bp, synthetic construct
  source 1..39: mol_type = other DNA
tttgatgtgaagatcgcggaacagatctctaaagaaacc

SEQ ID NO: 2340 - DNA, 39 bp, synthetic construct
  source 1..39: mol_type = other DNA
gaagcgctgatccgcaaagcgagcgagatcagcattaaa

SEQ ID NO: 2341 - DNA, 39 bp, synthetic construct
  source 1..39: mol_type = other DNA
gatgcgaaagcccgcgatgtggtgaaccgcctgaccgcg

SEQ ID NO: 2342 - DNA, 39 bp, synthetic construct
  source 1..39: mol_type = other DNA
atggatcaggttatgaaggcgcatgaattataccagaaa

SEQ ID NO: 2343 - DNA, 39 bp, synthetic construct
  source 1..39: mol_type = other DNA
ccgagcggcacgttcgtgcgtgaaaagatccgtgaaagc

SEQ ID NO: 2344 - DNA, 39 bp, synthetic construct
  source 1..39: mol_type = other DNA
ctggaaaaagttcgcgaacaggtgcaagccgcgcatgcg

SEQ ID NO: 2345 - DNA, 39 bp, synthetic construct
  source 1..39: mol_type = other DNA
cgtccgcgtgttgagcagattaccgccgagctgctggat

SEQ ID NO: 2346 - DNA, 39 bp, synthetic construct
  source 1..39: mol_type = other DNA
cgtgatctggcctctcgtattgtgtctacgcagcatcat

SEQ ID NO: 2347 - DNA, 39 bp, synthetic construct
  source 1..39: mol_type = other DNA
accagcctgatggagcgcgtgaccgaatacgccgaaaaa

SEQ ID NO: 2348 - DNA, 39 bp, synthetic construct
  source 1..39: mol_type = other DNA
caggaaaataagaagaaaaccgtggttgactttgaaacc

SEQ ID NO: 2349 - DNA, 39 bp, synthetic construct
  source 1..39: mol_type = other DNA
ctgaaagaaatctctgatctgattaagaaggaactgacc

SEQ ID NO: 2350 - DNA, 39 bp, synthetic construct
  source 1..39: mol_type = other DNA
cgtaaaagcttaggtgaactgattcacacgctggatggc

SEQ ID NO: 2351 - DNA, 39 bp, synthetic construct
  source 1..39: mol_type = other DNA
accgcgagcgttgacaaaaaatatgccgagctggtggat

SEQ ID NO: 2352 - DNA, 39 bp, synthetic construct
  source 1..39: mol_type = other DNA
gcgcaggaattaaagcagctgattgacacggcgaaagaa

SEQ ID NO: 2353 - DNA, 39 bp, synthetic construct
  source 1..39: mol_type = other DNA
gatgataaattagagcagattcgtaaggactataccagc

SEQ ID NO: 2354 - DNA, 39 bp, synthetic construct
  source 1..39: mol_type = other DNA
tttaaacagttagttgaagatctggaccgcattctgacc

SEQ ID NO: 2355 - DNA, 39 bp, synthetic construct
  source 1..39: mol_type = other DNA
ccgcgtcagaaggaggcgctggcgaagttccgtgaaaat

SEQ ID NO: 2356 - DNA, 39 bp, synthetic construct
  source 1..39: mol_type = other DNA
gcggcgaccttagaggaaaaactgaacaagatttttgaa

SEQ ID NO: 2357 - DNA, 39 bp, synthetic construct
  source 1..39: mol_type = other DNA
aaaaaaagcttaacggaaattaaagacgttctggcgagc

SEQ ID NO: 2358 - DNA, 39 bp, synthetic construct
  source 1..39: mol_type = other DNA
cagaaagatttaaaggattgggtggaagccttaaatcag

SEQ ID NO: 2359 - DNA, 39 bp, synthetic construct
  source 1..39: mol_type = other DNA
gaaaccacccgcttatggcgtgaagtggttacggaagtg

SEQ ID NO: 2360 - DNA, 39 bp, synthetic construct
  source 1..39: mol_type = other DNA
aaagatgcgacgaacgaagcgattcgcgactggattacc

SEQ ID NO: 2361 - DNA, 39 bp, synthetic construct
  source 1..39: mol_type = other DNA
tatgatgatatcaaggcggcgatgaaaacggccagcgaa

SEQ ID NO: 2362 - DNA, 39 bp, synthetic construct
  source 1..39: mol_type = other DNA
gaaaaagtgatcaagtgggcggaacagaacgccgcggaa

SEQ ID NO: 2363 - DNA, 39 bp, synthetic construct
  source 1..39: mol_type = other DNA
aaagaagaagaccaacgtgtgattaagttagtgcagaaa

SEQ ID NO: 2364 - DNA, 39 bp, synthetic construct
  source 1..39: mol_type = other DNA
gaagaacaggttgacaaaattaatcaacgcctgaaagaa

SEQ ID NO: 2365 - DNA, 39 bp, synthetic construct
  source 1..39: mol_type = other DNA
gtggatgaagccttaaaagatgcgcaaacgcgtattacc

SEQ ID NO: 2366 - DNA, 39 bp, synthetic construct
  source 1..39: mol_type = other DNA
aatgaaacccgcgcctatgtgctggaccgcatgaaagaa

SEQ ID NO: 2367 - DNA, 39 bp, synthetic construct
  source 1..39: mol_type = other DNA
aaagaagaattagttcgtctgattcaaacggcgcatgcg

SEQ ID NO: 2368 - DNA, 39 bp, synthetic construct
  source 1..39: mol_type = other DNA
gaagcggaaaagacgggcgcgcaggagttactgcgtgtg

SEQ ID NO: 2369 - DNA, 39 bp, synthetic construct
  source 1..39: mol_type = other DNA
ctggaagatttaaagctgaccaccgacttactgctgaaa

SEQ ID NO: 2370 - DNA, 39 bp, synthetic construct
  source 1..39: mol_type = other DNA
ccggaatttcaagccaatgaagtgcgcaaggtgaaaaaa

SEQ ID NO: 2371 - DNA, 39 bp, synthetic construct
  source 1..39: mol_type = other DNA
cgtgcggatttagaggcgaccctgcgcaagattaccgat

SEQ ID NO: 2372 - DNA, 39 bp, synthetic construct
  source 1..39: mol_type = other DNA
ccgcgtgcgatcgagaccgcgaaagagaacgcgaaactg

SEQ ID NO: 2373 - DNA, 39 bp, synthetic construct
  source 1..39: mol_type = other DNA
caggaagcgttatctgtggcgcgtgccttcgatgaaaaa

SEQ ID NO: 2374 - DNA, 39 bp, synthetic construct
  source 1..39: mol_type = other DNA
aaagatcgtaacgacctgattacctacttaaaaaaagcg

SEQ ID NO: 2375 - DNA, 39 bp, synthetic construct
  source 1..39: mol_type = other DNA
cgtgaaaccttattaaccatggcggaacgcgcccgtgcg

SEQ ID NO: 2376 - DNA, 39 bp, synthetic construct
  source 1..39: mol_type = other DNA
gaaaccacccgcttagcgctgaaagccttagcgcgtcat

SEQ ID NO: 2377 - DNA, 39 bp, synthetic construct
  source 1..39: mol_type = other DNA
attccgagcaagtaccgtgatgaattaacggcgaaactg

SEQ ID NO: 2378 - DNA, 39 bp, synthetic construct
  source 1..39: mol_type = other DNA
gcgaaagtgtctgaggcgctggaaaagcgctatagcatg

SEQ ID NO: 2379 - DNA, 39 bp, synthetic construct
  source 1..39: mol_type = other DNA
attagcgatacggttaaacgtgcgcgcgaggcgtttaat

SEQ ID NO: 2380 - DNA, 39 bp, synthetic construct
  source 1..39: mol_type = other DNA
agcgatgatcgcaagaaacatctgttaatccgtgaacag

SEQ ID NO: 2381 - DNA, 39 bp, synthetic construct
  source 1..39: mol_type = other DNA
accagcaccatctctgcgctggaacgcgttaaaaaagaa

SEQ ID NO: 2382 - DNA, 39 bp, synthetic construct
  source 1..39: mol_type = other DNA
acccatgcgtctatcgatctgaccaagaaggcgaccgaa

SEQ ID NO: 2383 - DNA, 39 bp, synthetic construct
  source 1..39: mol_type = other DNA
gaaacccgtatcaacattgtgaaattaacggaaaaaatt

SEQ ID NO: 2384 - DNA, 39 bp, synthetic construct
  source 1..39: mol_type = other DNA
aaacagcgtatcgttgaagaagtgacgcgcctgctgaaa

SEQ ID NO: 2385 - DNA, 39 bp, synthetic construct
  source 1..39: mol_type = other DNA
agcgaagatgccaagggcctgattaagtctgcgattcgt

SEQ ID NO: 2386 - DNA, 39 bp, synthetic construct
  source 1..39: mol_type = other DNA
gtgcgtgatgagcgcaatgtgattcgcgccgcgagcaat

SEQ ID NO: 2387 - DNA, 39 bp, synthetic construct
  source 1..39: mol_type = other DNA
ccgcgtgatgttgagaccctgctgcaaggtatgcgtgat

SEQ ID NO: 2388 - DNA, 39 bp, synthetic construct
  source 1..39: mol_type = other DNA
gcgaaagatcgcgttgatctgcagttcggtgtggaacag

SEQ ID NO: 2389 - DNA, 39 bp, synthetic construct
  source 1..39: mol_type = other DNA
accgatggcacgggtcatattcgtgccatcaaagaaagc

SEQ ID NO: 2390 - DNA, 39 bp, synthetic construct
  source 1..39: mol_type = other DNA
caggaaagcgttaagagcaaagtgcaatacctgaaagat

SEQ ID NO: 2391 - DNA, 39 bp, synthetic construct
  source 1..39: mol_type = other DNA
gaacagctgttacgcaaagcggaagcccaagcgaaaaaa

SEQ ID NO: 2392 - DNA, 39 bp, synthetic construct
  source 1..39: mol_type = other DNA
gtggaaaatgttacggaactgaaaaagaactttaatcgt

SEQ ID NO: 2393 - DNA, 39 bp, synthetic construct
  source 1..39: mol_type = other DNA
atgcgtcaggttgaggcgctggtggaggccagcaaagaa

SEQ ID NO: 2394 - DNA, 39 bp, synthetic construct
  source 1..39: mol_type = other DNA
cgtgatcatttagagaattttgtgaagtctctggaagcg

SEQ ID NO: 2395 - DNA, 39 bp, synthetic construct
  source 1..39: mol_type = other DNA
cagaaagaaatcgaccgtctgaatgaggttgcgaaaaat

SEQ ID NO: 2396 - DNA, 39 bp, synthetic construct
  source 1..39: mol_type = other DNA
ctggatgaaatcatcagccgtgcgaagaaggcggaaacc

SEQ ID NO: 2397 - DNA, 39 bp, synthetic construct
  source 1..39: mol_type = other DNA
ctggaaaaattaacgcaggatgtgttagacattgcgcgt

SEQ ID NO: 2398 - DNA, 39 bp, synthetic construct
  source 1..39: mol_type = other DNA
gataaactgatctctgaaaccgcgaagtctgtgatgaaa

SEQ ID NO: 2399 - DNA, 39 bp, synthetic construct
  source 1..39: mol_type = other DNA
cagcgtgtggaggccatgtttcataccttagacaaaatt

SEQ ID NO: 2400 - DNA, 39 bp, synthetic construct
  source 1..39: mol_type = other DNA
gtgaccgaatctatcgatgcgcatttattagcgaaaaaa

SEQ ID NO: 2401 - DNA, 39 bp, synthetic construct
  source 1..39: mol_type = other DNA
gaaggcctgtacgaccagattatgcgtgttaagaatgat

SEQ ID NO: 2402 - DNA, 39 bp, synthetic construct
  source 1..39: mol_type = other DNA
aatcgtgaaatccgcgaaattaatcgcgtttataaagaa

SEQ ID NO: 2403 - DNA, 39 bp, synthetic construct
  source 1..39: mol_type = other DNA
ctgaatgtgttagagcgtaaactgtctgagtttgataaa

SEQ ID NO: 2404 - DNA, 39 bp, synthetic construct
  source 1..39: mol_type = other DNA
atgcgtgaacgcatcgaatttctgaacgaggcgagcgtg

SEQ ID NO: 2405 - DNA, 39 bp, synthetic construct
  source 1..39: mol_type = other DNA
gaacagcatttacgcaaagcggaagcccaagcgaaaaaa

SEQ ID NO: 2406 - DNA, 39 bp, synthetic construct
  source 1..39: mol_type = other DNA
gtggaagtgaagtctattgtggatttcatcaaaagccat

SEQ ID NO: 2407 - DNA, 39 bp, synthetic construct
  source 1..39: mol_type = other DNA
gtggaagtgaagtctattgtggatttcgttaaaaatcat

SEQ ID NO: 2408 - DNA, 42 bp, synthetic construct
  source 1..42: mol_type = other DNA
ggcacccattctaaggaacgtgaagtttggaaggaagcgctg

SEQ ID NO: 2409 - DNA, 42 bp, synthetic construct
  source 1..42: mol_type = other DNA
aatggcaaaaaccgcgtgaaacagtgggacacgctggtggat

SEQ ID NO: 2410 - DNA, 42 bp, synthetic construct
  source 1..42: mol_type = other DNA
gaaaaactgaagatcaaagcgcagtcttacctggatgccatt

SEQ ID NO: 2411 - DNA, 42 bp, synthetic construct
  source 1..42: mol_type = other DNA
ccggaacaggttatcgcggaagcgatccgcaaaaaaacgcgt

SEQ ID NO: 2412 - DNA, 42 bp, synthetic construct
  source 1..42: mol_type = other DNA
cgtgataaagttaacgatattgtggaccaagtgattacgatt

SEQ ID NO: 2413 - DNA, 42 bp, synthetic construct
  source 1..42: mol_type = other DNA
gaagcggaaaagacggcggcgcaggagttactgaaagttctg

SEQ ID NO: 2414 - DNA, 42 bp, synthetic construct
  source 1..42: mol_type = other DNA
cgtcatgtggccgagcgtgaaattgccacgctggcgggtagc

SEQ ID NO: 2415 - DNA, 42 bp, synthetic construct
  source 1..42: mol_type = other DNA
aatcaggatgagttaaaaaaactggccgccaccgaagccgcg

SEQ ID NO: 2416 - DNA, 42 bp, synthetic construct
  source 1..42: mol_type = other DNA
ctgatggataacgcccgtgtggtggaccaactgatgaaagat

SEQ ID NO: 2417 - DNA, 42 bp, synthetic construct
  source 1..42: mol_type = other DNA
acccatctgcaagttatggcgaaagaacgcttccatgcgggc

SEQ ID NO: 2418 - DNA, 42 bp, synthetic construct
  source 1..42: mol_type = other DNA
gaactgagcaaccgcattcgtgaacacggtcgtaatatcgcg

SEQ ID NO: 2419 - DNA, 42 bp, synthetic construct
  source 1..42: mol_type = other DNA
aatgtgcgtgagttaaaaaatgtgatcgagcgtgcggttctg

SEQ ID NO: 2420 - DNA, 42 bp, synthetic construct
  source 1..42: mol_type = other DNA
ccgacccgtgacgttgtgcagcgtgccttagcggaattagaa

SEQ ID NO: 2421 - DNA, 42 bp, synthetic construct
  source 1..42: mol_type = other DNA
aatgaacgtaacgaggcgctgctgaagcgcattaatggtcgt

SEQ ID NO: 2422 - DNA, 42 bp, synthetic construct
  source 1..42: mol_type = other DNA
cgtgaagaattaacggcggtgatgcgtttcttaacccagcgt

SEQ ID NO: 2423 - DNA, 42 bp, synthetic construct
  source 1..42: mol_type = other DNA
caggaacgtgccaaggaactggcggagaacgcgagcttcatt

SEQ ID NO: 2424 - DNA, 42 bp, synthetic construct
  source 1..42: mol_type = other DNA
tatcgtggcaagatcgaaaaagcggttgacctgacctctagc

SEQ ID NO: 2425 - DNA, 42 bp, synthetic construct
  source 1..42: mol_type = other DNA
cgtcagcataacttcgaagtggcgaaggagctgctggagacc

SEQ ID NO: 2426 - DNA, 42 bp, synthetic construct
  source 1..42: mol_type = other DNA
gatccggtgaaccaacatgtgatttctgagggcctgaagaaa

SEQ ID NO: 2427 - DNA, 42 bp, synthetic construct
  source 1..42: mol_type = other DNA
tttcgtgatttagccctgcgtgtggaccaaattcgtgacaat

SEQ ID NO: 2428 - DNA, 42 bp, synthetic construct
  source 1..42: mol_type = other DNA
gaaaaactgttagacaaagcgcagcgcatcgtgaccaacagc

SEQ ID NO: 2429 - DNA, 42 bp, synthetic construct
  source 1..42: mol_type = other DNA
catcaggcgatgcgcgccgcgggcgatgagttcgaaacccgt

SEQ ID NO: 2430 - DNA, 42 bp, synthetic construct
  source 1..42: mol_type = other DNA
cgtaaaaccatgttagagctggtggaaaaggttgcggaacag

SEQ ID NO: 2431 - DNA, 42 bp, synthetic construct
  source 1..42: mol_type = other DNA
cgtctggaaaacgacattattcgtttaatcaatcgtacggtg

SEQ ID NO: 2432 - DNA, 42 bp, synthetic construct
  source 1..42: mol_type = other DNA
ctgagcgatttcaaggaactgctgcgcacggtgaaagccacc

SEQ ID NO: 2433 - DNA, 42 bp, synthetic construct
  source 1..42: mol_type = other DNA
gaagatgaagttaagaccctgctggagttaaaaaccaagtat

SEQ ID NO: 2434 - DNA, 42 bp, synthetic construct
  source 1..42: mol_type = other DNA
gcgcagattacggaggcgattgatggtgttcgtgaacgcctg

SEQ ID NO: 2435 - DNA, 42 bp, synthetic construct
  source 1..42: mol_type = other DNA
cagaatcgtttcgacagcctgattacggagctgggcaaggaa

SEQ ID NO: 2436 - DNA, 42 bp, synthetic construct
  source 1..42: mol_type = other DNA
ccggataaaatcgagaaaattctgtctacgctggtgaagggc

SEQ ID NO: 2437 - DNA, 42 bp, synthetic construct
  source 1..42: mol_type = other DNA
ccggatattcgcgagcgttttaccaagtctcgtgatgccacc

SEQ ID NO: 2438 - DNA, 42 bp, synthetic construct
  source 1..42: mol_type = other DNA
ctgcgtgatcgcatcaaaagcaaagttgacgaacagttcgat

SEQ ID NO: 2439 - DNA, 42 bp, synthetic construct
  source 1..42: mol_type = other DNA
cagcgtgatcgcttacgtagctatcgcttactggcggaggcg

SEQ ID NO: 2440 - DNA, 42 bp, synthetic construct
  source 1..42: mol_type = other DNA
ctggatgaagccatccagctggcgaaggccctggaaaagaat

SEQ ID NO: 2441 - DNA, 42 bp, synthetic construct
  source 1..42: mol_type = other DNA
gaagaatatttaacgagcctgggccgcaagcatcgtgccgtg

SEQ ID NO: 2442 - DNA, 42 bp, synthetic construct
  source 1..42: mol_type = other DNA
ctgaaaagcacgcaaaccgtgattcacaaggcgctggagaaa

SEQ ID NO: 2443 - DNA, 42 bp, synthetic construct
  source 1..42: mol_type = other DNA
gaaaaaagcttcaaggcgctgatgcatttagttagcaatgaa

SEQ ID NO: 2444 - DNA, 42 bp, synthetic construct
  source 1..42: mol_type = other DNA
atgaaagaagttgacgaacagatgctgaacgttcagaataaa

SEQ ID NO: 2445 - DNA, 42 bp, synthetic construct
  source 1..42: mol_type = other DNA
accgtggaaatgttagttaaagtgatttctgagcataaaaat

SEQ ID NO: 2446 - DNA, 42 bp, synthetic construct
  source 1..42: mol_type = other DNA
gcggatgaagttgttaaagtggcgaactgggccaaagataat

SEQ ID NO: 2447 - DNA, 42 bp, synthetic construct
  source 1..42: mol_type = other DNA
ggcgatacccacaagcgtatttgggatgccgttgcgagcgcg

SEQ ID NO: 2448 - DNA, 42 bp, synthetic construct
  source 1..42: mol_type = other DNA
aatagcgaattaatccgtctgagcatggttttaaaagaaaaa

SEQ ID NO: 2449 - DNA, 42 bp, synthetic construct
  source 1..42: mol_type = other DNA
ccggaagataaggttaaagcggtgacgaagctgaatcaacat

SEQ ID NO: 2450 - DNA, 42 bp, synthetic construct
  source 1..42: mol_type = other DNA
aaagaaggcaaggccaccgtggaagccttaattaataagtat

SEQ ID NO: 2451 - DNA, 42 bp, synthetic construct
  source 1..42: mol_type = other DNA
gatgatgaaaagaacgtggcgattgccaagtatagccaactg

SEQ ID NO: 2452 - DNA, 42 bp, synthetic construct
  source 1..42: mol_type = other DNA
ccgaccaccgacgccctggaaaaaaagttagcggtgttagaa

SEQ ID NO: 2453 - DNA, 42 bp, synthetic construct
  source 1..42: mol_type = other DNA
cgtgaagtgttagccgaaaaagtgaagaacgcggtgaacaat

SEQ ID NO: 2454 - DNA, 42 bp, synthetic construct
  source 1..42: mol_type = other DNA
cagaccgtggaccgcctgcattttatcaagcgtatgcaggaa

SEQ ID NO: 2455 - DNA, 42 bp, synthetic construct
  source 1..42: mol_type = other DNA
gaacgtcaggttcgcattcagctgaaggaccatattgaccgt

SEQ ID NO: 2456 - DNA, 42 bp, synthetic construct
  source 1..42: mol_type = other DNA
aaagaaaccatcgacaaagtgagcgacatcgtgaaagagaaa

SEQ ID NO: 2457 - DNA, 42 bp, synthetic construct
  source 1..42: mol_type = other DNA
gtggatgatacgtctgatgtgattgacgccctgcgtaagcgt

SEQ ID NO: 2458 - DNA, 42 bp, synthetic construct
  source 1..42: mol_type = other DNA
gcggcgagcatcgacgcggtgtttgagacgctggaaaagaaa

SEQ ID NO: 2459 - DNA, 42 bp, synthetic construct
  source 1..42: mol_type = other DNA
cgtgaacagttaacgcagctggtggagttcgcgaaaaagaat

SEQ ID NO: 2460 - DNA, 42 bp, synthetic construct
  source 1..42: mol_type = other DNA
ctgagcaccgcccaaaaaattattaaggaggcgcgtgacgcg

SEQ ID NO: 2461 - DNA, 42 bp, synthetic construct
  source 1..42: mol_type = other DNA
aatgaaaaaacggccgaactgattaaggagctgaaagagaaa

SEQ ID NO: 2462 - DNA, 42 bp, synthetic construct
  source 1..42: mol_type = other DNA
aaagaagtggttaaggcgaatattgacaagattaaatctctg

SEQ ID NO: 2463 - DNA, 42 bp, synthetic construct
  source 1..42: mol_type = other DNA
gatgaaagccgcggtaaagcgcgtgccgccggcgtggagagc

SEQ ID NO: 2464 - DNA, 42 bp, synthetic construct
  source 1..42: mol_type = other DNA
gcggaagtgcactctcagtttgatgccttaaaagcgcgcatt

SEQ ID NO: 2465 - DNA, 42 bp, synthetic construct
  source 1..42: mol_type = other DNA
ccgggccagcgcgagaaactgttttctaagctgattgacatt

SEQ ID NO: 2466 - DNA, 42 bp, synthetic construct
  source 1..42: mol_type = other DNA
aataaagcggcccgcgaaatgaaagaacgcgttggccagacc

SEQ ID NO: 2467 - DNA, 42 bp, synthetic construct
  source 1..42: mol_type = other DNA
ccggatcaggttaaggcgagcattgaccacatttttaaggaa

SEQ ID NO: 2468 - DNA, 42 bp, synthetic construct
  source 1..42: mol_type = other DNA
gaagtgattacgtctgcgatggcgaaaaaggcccatgaactg

SEQ ID NO: 2469 - DNA, 42 bp, synthetic construct
  source 1..42: mol_type = other DNA
aaagataaaacgaagggcgatgcgatcgacctgagcaacgcg

SEQ ID NO: 2470 - DNA, 42 bp, synthetic construct
  source 1..42: mol_type = other DNA
gcggatcatttattaaaagcgcatttacaaaaactgatgagc

SEQ ID NO: 2471 - DNA, 42 bp, synthetic construct
  source 1..42: mol_type = other DNA
agcctgcagatcatggagaaaattattaagaaggcgggcgat

SEQ ID NO: 2472 - DNA, 42 bp, synthetic construct
  source 1..42: mol_type = other DNA
agcaaagaaatcttagcggaagcgaagaagctgaatgacgcg

SEQ ID NO: 2473 - DNA, 42 bp, synthetic construct
  source 1..42: mol_type = other DNA
gaaaaagtggagtctgaaattaaaaaggttgaaaatttcctg

SEQ ID NO: 2474 - DNA, 42 bp, synthetic construct
  source 1..42: mol_type = other DNA
gcggatcgtgttttaaaagaatttaaggacctgctgaacagc

SEQ ID NO: 2475 - DNA, 42 bp, synthetic construct
  source 1..42: mol_type = other DNA
gcggaatttttagttaaaagcaaacaccgcgatctgacggcg

SEQ ID NO: 2476 - DNA, 42 bp, synthetic construct
  source 1..42: mol_type = other DNA
aaagaaacctctgacctgctgcgtaagatcgcggcggacagc

SEQ ID NO: 2477 - DNA, 42 bp, synthetic construct
  source 1..42: mol_type = other DNA
catcgtgatgacgttgcggaagtgacgaagctgctggccacc

SEQ ID NO: 2478 - DNA, 42 bp, synthetic construct
  source 1..42: mol_type = other DNA
ccggaaaccggtgagagcgcggcgcgccacctggaacgcgcg

SEQ ID NO: 2479 - DNA, 42 bp, synthetic construct
  source 1..42: mol_type = other DNA
tttgatgatgccttaaatattgtgcgcaagattggcgagaat

SEQ ID NO: 2480 - DNA, 42 bp, synthetic construct
  source 1..42: mol_type = other DNA
cgtgaaaaattagaggcggcggcgtctcgcattgcgtctctg

SEQ ID NO: 2481 - DNA, 42 bp, synthetic construct
  source 1..42: mol_type = other DNA
caggaaggcttacgcaaacattttggtaaggtggcggagagc

SEQ ID NO: 2482 - DNA, 42 bp, synthetic construct
  source 1..42: mol_type = other DNA
cgtaaactgatcgacgatgcggtggcctgggccaaacagcag

SEQ ID NO: 2483 - DNA, 42 bp, synthetic construct
  source 1..42: mol_type = other DNA
gatgcggataaggagaatattattgccttaagcaaagccctg

SEQ ID NO: 2484 - DNA, 42 bp, synthetic construct
  source 1..42: mol_type = other DNA
ccgcgtaccttaaacgcgtgggtgaaattagttgaagaaaaa

SEQ ID NO: 2485 - DNA, 42 bp, synthetic construct
  source 1..42: mol_type = other DNA
attcagcgtcgcatcaaaaaagtgacgcacgatatggatatg

SEQ ID NO: 2486 - DNA, 42 bp, synthetic construct
  source 1..42: mol_type = other DNA
tttgatgatgccttacgtctgacccaaaagctgaccgaggcg

SEQ ID NO: 2487 - DNA, 42 bp, synthetic construct
  source 1..42: mol_type = other DNA
aaagatcgtggtatgacgctggcggtgtctaaggcggtggaa

SEQ ID NO: 2488 - DNA, 42 bp, synthetic construct
  source 1..42: mol_type = other DNA
ctgagcgattacatcaaactgaccaaggagaatatgcgtaaa

SEQ ID NO: 2489 - DNA, 42 bp, synthetic construct
  source 1..42: mol_type = other DNA
gatcgtctgacgcgcgcggcgaaagttttagaacagttaagc

SEQ ID NO: 2490 - DNA, 42 bp, synthetic construct
  source 1..42: mol_type = other DNA
gtgagcgaagttaaggcgattattaagaagcaggtggacgaa

SEQ ID NO: 2491 - DNA, 42 bp, synthetic construct
  source 1..42: mol_type = other DNA
atgagcgcggttgttaaaaaagtggccgaccgtctgacggaa

SEQ ID NO: 2492 - DNA, 42 bp, synthetic construct
  source 1..42: mol_type = other DNA
gcggtgaatcacatcaaaagcgtgtggaaggacctgctggaa

SEQ ID NO: 2493 - DNA, 42 bp, synthetic construct
  source 1..42: mol_type = other DNA
catcatgaattaacgcgtgtggcgtctgccctgcgtaagctg

SEQ ID NO: 2494 - DNA, 42 bp, synthetic construct
  source 1..42: mol_type = other DNA
cgtaatgatatcgttcagagcctggagaaggcggtggacatg

SEQ ID NO: 2495 - DNA, 42 bp, synthetic construct
  source 1..42: mol_type = other DNA
gcgcaggcggacttactgaatctgaagcgcaaagtggacgcg

SEQ ID NO: 2496 - DNA, 42 bp, synthetic construct
  source 1..42: mol_type = other DNA
ctggatcgtttccaagaagcgatttctgccattcgtgaggtg

SEQ ID NO: 2497 - DNA, 42 bp, synthetic construct
  source 1..42: mol_type = other DNA
gtgaatgaaatcgacaaaattgtggagcgcacccgtgagctg

SEQ ID NO: 2498 - DNA, 42 bp, synthetic construct
  source 1..42: mol_type = other DNA
cgtggctttttaaagcagctgcgtgagttagataaacaactg

SEQ ID NO: 2499 - DNA, 42 bp, synthetic construct
  source 1..42: mol_type = other DNA
cgtctggaacgcgcccgtcagatgggcgcctctctggaagcg

SEQ ID NO: 2500 - DNA, 42 bp, synthetic construct
  source 1..42: mol_type = other DNA
ctggatctggcccgcaaagaactgaagaagatgcaggatcag

SEQ ID NO: 2501 - DNA, 42 bp, synthetic construct
  source 1..42: mol_type = other DNA
ctgaatcagttaaagcgtattgtggacaaggcgagcgagctg

SEQ ID NO: 2502 - DNA, 42 bp, synthetic construct
  source 1..42: mol_type = other DNA
gaaaaaattatcaaggaatttattacgaagaccctgacggat

SEQ ID NO: 2503 - DNA, 42 bp, synthetic construct
  source 1..42: mol_type = other DNA
ctggaagtgtctcgcgcggcggaacgcgtttttaaaaagcag

SEQ ID NO: 2504 - DNA, 42 bp, synthetic construct
  source 1..42: mol_type = other DNA
cgtaccaccgagaagaaaattatggataagttagtgcaggaa

SEQ ID NO: 2505 - DNA, 42 bp, synthetic construct
  source 1..42: mol_type = other DNA
gatcgtgcggagatggttgaaacccagaagacgtttaccctg

SEQ ID NO: 2506 - DNA, 42 bp, synthetic construct
  source 1..42: mol_type = other DNA
gaagatctgaagcaaaaagtgctggacaactggaccaaaatg

SEQ ID NO: 2507 - DNA, 42 bp, synthetic construct
  source 1..42: mol_type = other DNA
cgtcatatggtgcacgagctggtgagcaacttacgtaaagaa

SEQ ID NO: 2508 - DNA, 42 bp, synthetic construct
  source 1..42: mol_type = other DNA
ctggcgaccttagagcgttatgtggagacgcaggcgaaggaa

SEQ ID NO: 2509 - DNA, 42 bp, synthetic construct
  source 1..42: mol_type = other DNA
gaagatctgatctggaagctgctgagcaaggcccaggaaaaa

SEQ ID NO: 2510 - DNA, 42 bp, synthetic construct
  source 1..42: mol_type = other DNA
caggattatgttaaggaactgcatcaacaaattacccgcctg

SEQ ID NO: 2511 - DNA, 42 bp, synthetic construct
  source 1..42: mol_type = other DNA
cgtgatcatgagacgagccatagcttagcccgtgaagtttat

SEQ ID NO: 2512 - DNA, 42 bp, synthetic construct
  source 1..42: mol_type = other DNA
aaagcggaagttttaaaagatgaaaactctcgtctgaacgcg

SEQ ID NO: 2513 - DNA, 42 bp, synthetic construct
  source 1..42: mol_type = other DNA
gaagcgctgatccgcaaagcgagcgagatcagcattaaggcg

SEQ ID NO: 2514 - DNA, 42 bp, synthetic construct
  source 1..42: mol_type = other DNA
gaaagcctggttgaccagcgtattaaggaggcgctgtctcgt

SEQ ID NO: 2515 - DNA, 42 bp, synthetic construct
  source 1..42: mol_type = other DNA
ccgaaactgttacaccgtgtggtggagcaactgcagaaggtg

SEQ ID NO: 2516 - DNA, 42 bp, synthetic construct
  source 1..42: mol_type = other DNA
agcgaaaatcaagttattgcggtggacacgcagcgtgagaaa

SEQ ID NO: 2517 - DNA, 42 bp, synthetic construct
  source 1..42: mol_type = other DNA
cgtgaactggcccgccagattatggatgttgttaccgaaatg

SEQ ID NO: 2518 - DNA, 42 bp, synthetic construct
  source 1..42: mol_type = other DNA
catgcgcaggccgttgattatattaagaagctgatgaccaaa

SEQ ID NO: 2519 - DNA, 42 bp, synthetic construct
  source 1..42: mol_type = other DNA
agcaccgataaggacaccctggcggttttcgtggatcgcgtg

SEQ ID NO: 2520 - DNA, 42 bp, synthetic construct
  source 1..42: mol_type = other DNA
gcggatgaatctatcgatattgtgaaggccgtgaaaacgcgt

SEQ ID NO: 2521 - DNA, 42 bp, synthetic construct
  source 1..42: mol_type = other DNA
gataaaagccacgaccaggcggtgcgcacgtatcaggagcat

SEQ ID NO: 2522 - DNA, 42 bp, synthetic construct
  source 1..42: mol_type = other DNA
tgggtggataaggttaaagatctgacgaagagcgaaatgaat

SEQ ID NO: 2523 - DNA, 42 bp, synthetic construct
  source 1..42: mol_type = other DNA
aaagatgaaatgaagaagattctggaagacttcctgaatacc

SEQ ID NO: 2524 - DNA, 42 bp, synthetic construct
  source 1..42: mol_type = other DNA
accgataccttagagcgtgtgaccgagatctttaaagccctg

SEQ ID NO: 2525 - DNA, 42 bp, synthetic construct
  source 1..42: mol_type = other DNA
gtgcgtgatgttcgcgatgaaagcaacaagctgattgccaaa

SEQ ID NO: 2526 - DNA, 42 bp, synthetic construct
  source 1..42: mol_type = other DNA
cgtgaagcgttacgcgcggaatggcaggccacggcgaaagaa

SEQ ID NO: 2527 - DNA, 42 bp, synthetic construct
  source 1..42: mol_type = other DNA
attgtggaaaagatcctgcagtatcgcgagctgaccaagctg

SEQ ID NO: 2528 - DNA, 42 bp, synthetic construct
  source 1..42: mol_type = other DNA
ccgcgtgaaatcaagaatgcgattgagaagagcgtgacggat

SEQ ID NO: 2529 - DNA, 42 bp, synthetic construct
  source 1..42: mol_type = other DNA
accaatcgtgttgagctgctggcgaagaagattaccgacctg

SEQ ID NO: 2530 - DNA, 42 bp, synthetic construct
  source 1..42: mol_type = other DNA
ccgcatgaattatctcgtgtggcggccacgctgcgtaagctg

SEQ ID NO: 2531 - DNA, 42 bp, synthetic construct
  source 1..42: mol_type = other DNA
aaaggctataagttaattgcggaagttatcaccaaaacggat

SEQ ID NO: 2532 - DNA, 42 bp, synthetic construct
  source 1..42: mol_type = other DNA
cgtgaaaccttagagattagctatcgcaacgcgattgcccgt

SEQ ID NO: 2533 - DNA, 42 bp, synthetic construct
  source 1..42: mol_type = other DNA
gaagaaacccgcaacgcggtgtgggcggccatcaaagaactg

SEQ ID NO: 2534 - DNA, 42 bp, synthetic construct
  source 1..42: mol_type = other DNA
gataatggcttaaaggtggaagtgcgctctattctggagaaa

SEQ ID NO: 2535 - DNA, 42 bp, synthetic construct
  source 1..42: mol_type = other DNA
tttcagctggccacgaaaattatggataagttaattcgtgat

SEQ ID NO: 2536 - DNA, 42 bp, synthetic construct
  source 1..42: mol_type = other DNA
ctgcgtgaaggtgttctggtgagcgaggttctgaaagagaat

SEQ ID NO: 2537 - DNA, 42 bp, synthetic construct
  source 1..42: mol_type = other DNA
atgtataatggtgaccgtgcgcgtaagcaagtgctggttgat

SEQ ID NO: 2538 - DNA, 42 bp, synthetic construct
  source 1..42: mol_type = other DNA
ctggatcaggccgagagcatttataaggccgcggcggagcgt

SEQ ID NO: 2539 - DNA, 42 bp, synthetic construct
  source 1..42: mol_type = other DNA
cgtgaagaatggaagggtcaggcggaaacgaacaaaattctg

SEQ ID NO: 2540 - DNA, 42 bp, synthetic construct
  source 1..42: mol_type = other DNA
ctgaaaagcttacaagtgcgtctggagttagcgcgtgagctg

SEQ ID NO: 2541 - DNA, 42 bp, synthetic construct
  source 1..42: mol_type = other DNA
agcgaacaggttgttcatcagctggagcgcctgattgcccgt

SEQ ID NO: 2542 - DNA, 42 bp, synthetic construct
  source 1..42: mol_type = other DNA
gaagcgatgtggcgtgagacgattgcgcgtgttcgcaccgaa

SEQ ID NO: 2543 - DNA, 42 bp, synthetic construct
  source 1..42: mol_type = other DNA
aaaagcaccttagccgtggaactggagcaccagctggttcgt

SEQ ID NO: 2544 - DNA, 42 bp, synthetic construct
  source 1..42: mol_type = other DNA
aatgaaccgcaccaacgtctggaatctttagtgaaatctaaa

SEQ ID NO: 2545 - DNA, 42 bp, synthetic construct
  source 1..42: mol_type = other DNA
gcgtttaccaagtctgtggatgaattacgcgaaatggcgggc

SEQ ID NO: 2546 - DNA, 42 bp, synthetic construct
  source 1..42: mol_type = other DNA
gcggaacgtatccgccagctggaaacggaggcgggcgagcgt

SEQ ID NO: 2547 - DNA, 42 bp, synthetic construct
  source 1..42: mol_type = other DNA
gaagatgatgccatcgcgagcattcaccgcatttttaagaat

SEQ ID NO: 2548 - DNA, 42 bp, synthetic construct
  source 1..42: mol_type = other DNA
cagctggatacggccgtggtgcgtgccttacgtgaacgcttt

SEQ ID NO: 2549 - DNA, 42 bp, synthetic construct
  source 1..42: mol_type = other DNA
aaagaagcggagacgcgtgtgcgtgccttactgaaagagacc

SEQ ID NO: 2550 - DNA, 42 bp, synthetic construct
  source 1..42: mol_type = other DNA
cgtgaactggcctctcagattcatcgcgagctgattaagatt

SEQ ID NO: 2551 - DNA, 42 bp, synthetic construct
  source 1..42: mol_type = other DNA
ggcccggaagcctctgcgtttaaaaagaagatggtggaaaat

SEQ ID NO: 2552 - DNA, 42 bp, synthetic construct
  source 1..42: mol_type = other DNA
cgtgaaggcttagagaaacattttcaagccattattgacagc

SEQ ID NO: 2553 - DNA, 42 bp, synthetic construct
  source 1..42: mol_type = other DNA
aatgtgcgtgagttaaaaaatctgatcgagcgtgcggttatt

SEQ ID NO: 2554 - DNA, 42 bp, synthetic construct
  source 1..42: mol_type = other DNA
attgaaaaagttggtaaaattctgacgacggcgcattgggat

SEQ ID NO: 2555 - DNA, 42 bp, synthetic construct
  source 1..42: mol_type = other DNA
gaaaaagatgttgttcagattctgaaggccgtgagcgagttt

SEQ ID NO: 2556 - DNA, 42 bp, synthetic construct
  source 1..42: mol_type = other DNA
gcggatagcgttgagccgatgtttcgtcacttaaaaaatacc

SEQ ID NO: 2557 - DNA, 42 bp, synthetic construct
  source 1..42: mol_type = other DNA
aaaaaaaccttaaacgaaggcctgggtttactggaacgcgtg

SEQ ID NO: 2558 - DNA, 42 bp, synthetic construct
  source 1..42: mol_type = other DNA
gaaaaaaccatccaatatgtgaaagaggccatgaaaaaacat

SEQ ID NO: 2559 - DNA, 42 bp, synthetic construct
  source 1..42: mol_type = other DNA
aaaggcgaacgccaagatctggtggcctacctgaaatctgcg

SEQ ID NO: 2560 - DNA, 42 bp, synthetic construct
  source 1..42: mol_type = other DNA
ccgcaggatgttgttcgtctggcgaactgggcccatgaacat

SEQ ID NO: 2561 - DNA, 42 bp, synthetic construct
  source 1..42: mol_type = other DNA
gtgagcgatttaaagaaatatattgccgagctggaagttcag

SEQ ID NO: 2562 - DNA, 42 bp, synthetic construct
  source 1..42: mol_type = other DNA
caggaagtggccaaggaactggcggagaacgcgcgtaagatt

SEQ ID NO: 2563 - DNA, 42 bp, synthetic construct
  source 1..42: mol_type = other DNA
gaaaaaaatgttgccaaaatttttaagacggcgcgtgagctg

SEQ ID NO: 2564 - DNA, 42 bp, synthetic construct
  source 1..42: mol_type = other DNA
accgaaaatgagaagtttctgggcaagttagtgcgtgacaaa

SEQ ID NO: 2565 - DNA, 42 bp, synthetic construct
  source 1..42: mol_type = other DNA
gtgattggcaacgagaccaaaaaacaatacgaagcgttagaa

SEQ ID NO: 2566 - DNA, 42 bp, synthetic construct
  source 1..42: mol_type = other DNA
accctgaaagccttacaggaactgatcgccgatgtgcgcgat

SEQ ID NO: 2567 - DNA, 42 bp, synthetic construct
  source 1..42: mol_type = other DNA
agcaaagaagttttagtgcatgtgaagaacctggaaaagaat

SEQ ID NO: 2568 - DNA, 42 bp, synthetic construct
  source 1..42: mol_type = other DNA
gatatttttaacaagaatatgcgtgcgcacgccctggaaaaa

SEQ ID NO: 2569 - DNA, 42 bp, synthetic construct
  source 1..42: mol_type = other DNA
ccgaatatgaatgccgagcgtctgcagcgcacggcggatcgt

SEQ ID NO: 2570 - DNA, 42 bp, synthetic construct
  source 1..42: mol_type = other DNA
accgataaattcatcgatgcggcgaagcaagtggtgcgcgcg

SEQ ID NO: 2571 - DNA, 42 bp, synthetic construct
  source 1..42: mol_type = other DNA
accccgcaggttttcaaagaaattgaccgcctgcgtgagaat

SEQ ID NO: 2572 - DNA, 42 bp, synthetic construct
  source 1..42: mol_type = other DNA
accgaaaaagttgtttttgaacagacgaaggtgattgccgat

SEQ ID NO: 2573 - DNA, 42 bp, synthetic construct
  source 1..42: mol_type = other DNA
gatgcgcatcgccaaaatctggtgaactgggttgataaagtg

SEQ ID NO: 2574 - DNA, 42 bp, synthetic construct
  source 1..42: mol_type = other DNA
gatgcgaatttcgagcgtgtgcgtatgttagccgatcagctg

SEQ ID NO: 2575 - DNA, 42 bp, synthetic construct
  source 1..42: mol_type = other DNA
ggccgtgatttaacggattatctgatgaagatcctgaccgaa

SEQ ID NO: 2576 - DNA, 42 bp, synthetic construct
  source 1..42: mol_type = other DNA
aaaagcaccaaccgcgattatctggccgagcgtctgcgcgaa

SEQ ID NO: 2577 - DNA, 42 bp, synthetic construct
  source 1..42: mol_type = other DNA
ccggaagtggccaagcagtgggaacgtttagttcgtgcgacc

SEQ ID NO: 2578 - DNA, 42 bp, synthetic construct
  source 1..42: mol_type = other DNA
aaaaatgcgcgcgaggattttctggacaacgcggcgtctctg

SEQ ID NO: 2579 - DNA, 42 bp, synthetic construct
  source 1..42: mol_type = other DNA
ccgacccgtgacgccctggaaagcttattagcgaaattagat

SEQ ID NO: 2580 - DNA, 42 bp, synthetic construct
  source 1..42: mol_type = other DNA
gtgggcgatttaatcaaagcgtatgacaaccagaaaaagctg

SEQ ID NO: 2581 - DNA, 42 bp, synthetic construct
  source 1..42: mol_type = other DNA
caggaacatcgcgacctggcgcgtgaggccgcgcgtaagagc

SEQ ID NO: 2582 - DNA, 42 bp, synthetic construct
  source 1..42: mol_type = other DNA
aattatcgtacgatcaccaaagcgatcatccgtcatgttgaa

SEQ ID NO: 2583 - DNA, 42 bp, synthetic construct
  source 1..42: mol_type = other DNA
accgaacagaagaagcaggtgtttaaggttgcgaaagaggcg

SEQ ID NO: 2584 - DNA, 42 bp, synthetic construct
  source 1..42: mol_type = other DNA
aaaaccgaagttaaggaaatgctgaatttagccgcgaaacat

SEQ ID NO: 2585 - DNA, 42 bp, synthetic construct
  source 1..42: mol_type = other DNA
gaagaagtgaagaagaatgtgctgacgcaactgaatcgcgtg

SEQ ID NO: 2586 - DNA, 42 bp, synthetic construct
  source 1..42: mol_type = other DNA
gtggaagaattcaagagcattattgttgacattcagcgcagc

SEQ ID NO: 2587 - DNA, 42 bp, synthetic construct
  source 1..42: mol_type = other DNA
gcggcgaccttagaggaaaaactgaacaagatttttgagaaa

SEQ ID NO: 2588 - DNA, 42 bp, synthetic construct
  source 1..42: mol_type = other DNA
gcgacccaggttttagcggaagtggaggaggcgaaaaaggcg

SEQ ID NO: 2589 - DNA, 42 bp, synthetic construct
  source 1..42: mol_type = other DNA
gaaaatcgtttacgcgaaacccgtttaaacctgagccgcctg

SEQ ID NO: 2590 - DNA, 42 bp, synthetic construct
  source 1..42: mol_type = other DNA
gaaaatctgggtgcccgtgtgaaagagttatatctgcaaaaa

SEQ ID NO: 2591 - DNA, 42 bp, synthetic construct
  source 1..42: mol_type = other DNA
aaagcgaaagcccacaccattaccgttgaggcgcattctacc

SEQ ID NO: 2592 - DNA, 42 bp, synthetic construct
  source 1..42: mol_type = other DNA
gaaagcgcgtacttagataatctgaagaaggaactggccaat

SEQ ID NO: 2593 - DNA, 42 bp, synthetic construct
  source 1..42: mol_type = other DNA
accgaaatggcgaagaagattaccaaattagttaaagatagc

SEQ ID NO: 2594 - DNA, 42 bp, synthetic construct
  source 1..42: mol_type = other DNA
cgtagcgatttacacgcgaccctggttgacgcggcgcgcgcg

SEQ ID NO: 2595 - DNA, 42 bp, synthetic construct
  source 1..42: mol_type = other DNA
gatgaaattgtttctgcgcagaaaccattcgtggcgaagcat

SEQ ID NO: 2596 - DNA, 42 bp, synthetic construct
  source 1..42: mol_type = other DNA
gatgatattgttgagcagcagaaaccaatcgcgattaagcat

SEQ ID NO: 2597 - DNA, 42 bp, synthetic construct
  source 1..42: mol_type = other DNA
accgaagaaatgcgcgacctggtgcagcgcgagaccggcaaa

SEQ ID NO: 2598 - DNA, 42 bp, synthetic construct
  source 1..42: mol_type = other DNA
gcggcggcggagaagcagcgtctggcctctctgctgaaggat

SEQ ID NO: 2599 - DNA, 42 bp, synthetic construct
  source 1..42: mol_type = other DNA
aaaaaacagttagaggatgtgtttgttttactgaatgagaat

SEQ ID NO: 2600 - DNA, 42 bp, synthetic construct
  source 1..42: mol_type = other DNA
accgaatatgttgacgcgctgaaaaagttacagatgctgcat

SEQ ID NO: 2601 - DNA, 42 bp, synthetic construct
  source 1..42: mol_type = other DNA
aaaagcagcgttgccatgctggtggaacgcaagctgctggaa

SEQ ID NO: 2602 - DNA, 42 bp, synthetic construct
  source 1..42: mol_type = other DNA
gcgaaagtgtctgaggcgctggaaaagcgctatagcatgacc

SEQ ID NO: 2603 - DNA, 42 bp, synthetic construct
  source 1..42: mol_type = other DNA
ggcgaaaaattatacaccggcctgcgcgaggtggtgacggaa

SEQ ID NO: 2604 - DNA, 42 bp, synthetic construct
  source 1..42: mol_type = other DNA
ggcgaaagcttaaagaatctgattgacttccatattaaccat

SEQ ID NO: 2605 - DNA, 42 bp, synthetic construct
  source 1..42: mol_type = other DNA
cagctggaattacgcgatgcggtggagcacgcgcgtacgacc

SEQ ID NO: 2606 - DNA, 42 bp, synthetic construct
  source 1..42: mol_type = other DNA
gcggcgattacgcacaccgcgcgtatggccgacaaactgcgt

SEQ ID NO: 2607 - DNA, 42 bp, synthetic construct
  source 1..42: mol_type = other DNA
gaaaatgcgcgcaagtatgtggaacgcgttagcgaattaacc

SEQ ID NO: 2608 - DNA, 42 bp, synthetic construct
  source 1..42: mol_type = other DNA
ctgaccgaagttcaaaccattgtggagcaagtgaaagagaaa

SEQ ID NO: 2609 - DNA, 42 bp, synthetic construct
  source 1..42: mol_type = other DNA
gaaatgcgtaagggtattgatctggccacgaccctggagcgt

SEQ ID NO: 2610 - DNA, 42 bp, synthetic construct
  source 1..42: mol_type = other DNA
ctgacccgtgccgccgtggaactggccaaggaatggcgtacc

SEQ ID NO: 2611 - DNA, 42 bp, synthetic construct
  source 1..42: mol_type = other DNA
cgtcagaccgaggaccagctgaaaaagttaaaaggctacacc

SEQ ID NO: 2612 - DNA, 42 bp, synthetic construct
  source 1..42: mol_type = other DNA
gatcagcagcgcgactttcagcgtgagatccagattttaaaa

SEQ ID NO: 2613 - DNA, 42 bp, synthetic construct
  source 1..42: mol_type = other DNA
gcggataaattattaaccctggaagttaagagcctggacacc

SEQ ID NO: 2614 - DNA, 42 bp, synthetic construct
  source 1..42: mol_type = other DNA
ctggaagcggcccgccagtttagcgaggccgtgaaagccgaa

SEQ ID NO: 2615 - DNA, 42 bp, synthetic construct
  source 1..42: mol_type = other DNA
agccgtgtggccgactatcgtgataacatggccaaacagacc

SEQ ID NO: 2616 - DNA, 42 bp, synthetic construct
  source 1..42: mol_type = other DNA
gatcataccaagaaggcggtgctggaggccaaagaaaagacc

SEQ ID NO: 2617 - DNA, 42 bp, synthetic construct
  source 1..42: mol_type = other DNA
gaacgtggcaagaagcaggcgaaattattagcgcaggagctg

SEQ ID NO: 2618 - DNA, 42 bp, synthetic construct
  source 1..42: mol_type = other DNA
accgaagaattagttcagaaaattaaggccattaaagaggtg

SEQ ID NO: 2619 - DNA, 42 bp, synthetic construct
  source 1..42: mol_type = other DNA
ctgctgaaatctgccgtggaactggccaaggattggcgtacc

SEQ ID NO: 2620 - DNA, 42 bp, synthetic construct
  source 1..42: mol_type = other DNA
ccggaacgtacggaggtgctgggccgcgccgcggaagccacc

SEQ ID NO: 2621 - DNA, 42 bp, synthetic construct
  source 1..42: mol_type = other DNA
ctgaccaatcaccaaaaatttgcgaaggccaatgtgcgcgaa

SEQ ID NO: 2622 - DNA, 42 bp, synthetic construct
  source 1..42: mol_type = other DNA
caggtgcgtacggaggaactgctgacgggtcgtgcgttagaa

SEQ ID NO: 2623 - DNA, 42 bp, synthetic construct
  source 1..42: mol_type = other DNA
ctggaaaatgttttagaagcggcgcgccacctgcatcaaacc

SEQ ID NO: 2624 - DNA, 42 bp, synthetic construct
  source 1..42: mol_type = other DNA
ccgcgtgatgttgccgtgagcagcttccaccatgcgcgcctg

SEQ ID NO: 2625 - DNA, 42 bp, synthetic construct
  source 1..42: mol_type = other DNA
gatgaaaccttattcaaaaccctggttaaggcgaaagagctg

SEQ ID NO: 2626 - DNA, 42 bp, synthetic construct
  source 1..42: mol_type = other DNA
ccgaaagtgatccaccaggcgctggaggacaaaattgcccag

SEQ ID NO: 2627 - DNA, 42 bp, synthetic construct
  source 1..42: mol_type = other DNA
cgtgaacaggccgagcaggtgctgcgcgttgcgctgaagcat

SEQ ID NO: 2628 - DNA, 42 bp, synthetic construct
  source 1..42: mol_type = other DNA
gatggcgaaatgtaccaaaccctgcgtttagccaaagaactg

SEQ ID NO: 2629 - DNA, 42 bp, synthetic construct
  source 1..42: mol_type = other DNA
gatcatggcaagacgaccctgagcaaggttctgaccgagatt

SEQ ID NO: 2630 - DNA, 42 bp, synthetic construct
  source 1..42: mol_type = other DNA
cgtgcggaagttgccatgatgctgaatgatcgcaaccgtgaa

SEQ ID NO: 2631 - DNA, 42 bp, synthetic construct
  source 1..42: mol_type = other DNA
ccggatgaagccgcccgtcaggcgttagagaaacagcgcgaa

SEQ ID NO: 2632 - DNA, 42 bp, synthetic construct
  source 1..42: mol_type = other DNA
gataccctgcaagcccgtgcgatgctggacatcgtgaaacgt

SEQ ID NO: 2633 - DNA, 42 bp, synthetic construct
  source 1..42: mol_type = other DNA
caggtgcgtttagagcgtattctggacgagattagcaaggaa

SEQ ID NO: 2634 - DNA, 42 bp, synthetic construct
  source 1..42: mol_type = other DNA
ctggcgaccaagttatttgataatttagagcgtgtgaaggaa

SEQ ID NO: 2635 - DNA, 42 bp, synthetic construct
  source 1..42: mol_type = other DNA
ccgcgtaccttaaacgcgtgggtgaaagttgttgaagaaaaa

SEQ ID NO: 2636 - DNA, 42 bp, synthetic construct
  source 1..42: mol_type = other DNA
agcgcggcggagcgcgaactgattggtcgctttcaggaccgt

SEQ ID NO: 2637 - DNA, 42 bp, synthetic construct
  source 1..42: mol_type = other DNA
aaagcgctggacaaggtggaaaaagttttagtgagcgcccag

SEQ ID NO: 2638 - DNA, 42 bp, synthetic construct
  source 1..42: mol_type = other DNA
cgtaaacagttacaccagctggtggacttcgcgaaaacgaat

SEQ ID NO: 2639 - DNA, 42 bp, synthetic construct
  source 1..42: mol_type = other DNA
ctggaagaagccgttaatgcggaagcccgcaaaattgccaat

SEQ ID NO: 2640 - DNA, 42 bp, synthetic construct
  source 1..42: mol_type = other DNA
gcggaaagcgttgagcaggcgattgccgcccgtgaacaccgt

SEQ ID NO: 2641 - DNA, 42 bp, synthetic construct
  source 1..42: mol_type = other DNA
gatgaacagcgcaagctgctgaaagaggcccaggcggagcat

SEQ ID NO: 2642 - DNA, 42 bp, synthetic construct
  source 1..42: mol_type = other DNA
tttaaagaaatctctgatgatgtgaaggagaaaaataagaat

SEQ ID NO: 2643 - DNA, 42 bp, synthetic construct
  source 1..42: mol_type = other DNA
gtggaaaaagttttaaaaacccgttaccacgatgcgacgagc

SEQ ID NO: 2644 - DNA, 42 bp, synthetic construct
  source 1..42: mol_type = other DNA
cgtgaaaccttattaaccatggcggaacgcgcccgtgcggcg

SEQ ID NO: 2645 - DNA, 42 bp, synthetic construct
  source 1..42: mol_type = other DNA
gcggataaagtttacaaaaccctgcaacgcctgcgtgacctg

SEQ ID NO: 2646 - DNA, 42 bp, synthetic construct
  source 1..42: mol_type = other DNA
ccggatgatcaacaaaaagaagtggttaacatggcgcagaaa

SEQ ID NO: 2647 - DNA, 42 bp, synthetic construct
  source 1..42: mol_type = other DNA
gtggaacgtatcttcagcattgtggagcaacgtctggaggcg

SEQ ID NO: 2648 - DNA, 42 bp, synthetic construct
  source 1..42: mol_type = other DNA
tttgatgatgttacggatctgctgcgcaagaccctggttagc

SEQ ID NO: 2649 - DNA, 42 bp, synthetic construct
  source 1..42: mol_type = other DNA
gaacgtgaagcctctgatattattaacaacctgcgtaacttt

SEQ ID NO: 2650 - DNA, 42 bp, synthetic construct
  source 1..42: mol_type = other DNA
tgggataccttagaggcggtggtgaaggagaaactggccagc

SEQ ID NO: 2651 - DNA, 42 bp, synthetic construct
  source 1..42: mol_type = other DNA
gcggatgcgcactctaatctggcgtctatccataaagacagc

SEQ ID NO: 2652 - DNA, 42 bp, synthetic construct
  source 1..42: mol_type = other DNA
gaagcgagcgttcgcctggcggaacgcttagcgaaacaagcg

SEQ ID NO: 2653 - DNA, 42 bp, synthetic construct
  source 1..42: mol_type = other DNA
gcggcgattaaggccaaagatgatttccaaatggaaattacc

SEQ ID NO: 2654 - DNA, 42 bp, synthetic construct
  source 1..42: mol_type = other DNA
aaagaagcggccacggcggtggcgaaggcctttgaacaagaa

SEQ ID NO: 2655 - DNA, 42 bp, synthetic construct
  source 1..42: mol_type = other DNA
tataaaaaacgcttaaatgaactgatcacggatgcgttaatt

SEQ ID NO: 2656 - DNA, 42 bp, synthetic construct
  source 1..42: mol_type = other DNA
ggcgaagtggcccaaattattcgtaaggttggcacccgcgaa

SEQ ID NO: 2657 - DNA, 42 bp, synthetic construct
  source 1..42: mol_type = other DNA
gaagtggaaaagaacctggtgcgtgaggccgtgaaaaagagc

SEQ ID NO: 2658 - DNA, 42 bp, synthetic construct
  source 1..42: mol_type = other DNA
aaactggaacgcgagcgtatgcagaatgagtacgcgaaaagc

SEQ ID NO: 2659 - DNA, 42 bp, synthetic construct
  source 1..42: mol_type = other DNA
gaaagcgatttaaagcgtattggcgccatccattttaagacc

SEQ ID NO: 2660 - DNA, 42 bp, synthetic construct
  source 1..42: mol_type = other DNA
gataatcagatcggtgaagtggtgaagggttttgaaaagaaa

SEQ ID NO: 2661 - DNA, 42 bp, synthetic construct
  source 1..42: mol_type = other DNA
tataatgatgagaagaaactggcgtctaacgaaattgccaat

SEQ ID NO: 2662 - DNA, 42 bp, synthetic construct
  source 1..42: mol_type = other DNA
attaccaaacacatggagcgttatctggacatcctgaatagc

SEQ ID NO: 2663 - DNA, 42 bp, synthetic construct
  source 1..42: mol_type = other DNA
tttaatcgtgacatccagctgctgaaggccctggataacgaa

SEQ ID NO: 2664 - DNA, 42 bp, synthetic construct
  source 1..42: mol_type = other DNA
attctggaagcccaaaaaattaaaaagttagcggattctgcg

SEQ ID NO: 2665 - DNA, 42 bp, synthetic construct
  source 1..42: mol_type = other DNA
aaagaaacccaacaacgtcagattgacttatttaccaaggtg

SEQ ID NO: 2666 - DNA, 42 bp, synthetic construct
  source 1..42: mol_type = other DNA
gatgcgagcgaggttaccattcgtaaggccattgcgcgcttt

SEQ ID NO: 2667 - DNA, 42 bp, synthetic construct
  source 1..42: mol_type = other DNA
gtgcaggaagcccaaggcaaatggccggccttaaaagaaaaa

SEQ ID NO: 2668 - DNA, 42 bp, synthetic construct
  source 1..42: mol_type = other DNA
ctgggcaaaacgttagatgatcaggagcgcaaaattgccaat

SEQ ID NO: 2669 - DNA, 42 bp, synthetic construct
  source 1..42: mol_type = other DNA
ctgaccaaagccgccgtggaactggccaaggattggcgtacc

SEQ ID NO: 2670 - DNA, 42 bp, synthetic construct
  source 1..42: mol_type = other DNA
gattatcgtggtggtcagctggcggccaagcatctgcaagaa

SEQ ID NO: 2671 - DNA, 42 bp, synthetic construct
  source 1..42: mol_type = other DNA
gtggaaggcatcttcaatgatgtggttgagaatgtgaagcgt

SEQ ID NO: 2672 - DNA, 42 bp, synthetic construct
  source 1..42: mol_type = other DNA
ccggaagataagtctcgtattgtgtctgagctgaaagacaaa

SEQ ID NO: 2673 - DNA, 42 bp, synthetic construct
  source 1..42: mol_type = other DNA
gaagtgaccgttcgcaatcgttataaggagctggtggagaaa

SEQ ID NO: 2674 - DNA, 42 bp, synthetic construct
  source 1..42: mol_type = other DNA
aaaattgtgcaagagcgtctggaaaaggttattgcgtctgcg

SEQ ID NO: 2675 - DNA, 42 bp, synthetic construct
  source 1..42: mol_type = other DNA
catgaagcgttccaaaatcgtgtgaacgagctggcggccaaa

SEQ ID NO: 2676 - DNA, 42 bp, synthetic construct
  source 1..42: mol_type = other DNA
gcggaacatcgcacgctggcgcgtgaggccgtgcgtaagagc

SEQ ID NO: 2677 - DNA, 42 bp, synthetic construct
  source 1..42: mol_type = other DNA
ccgccggatcacacgcgtctgcgtggtttagtgagcaaggcg

SEQ ID NO: 2678 - DNA, 42 bp, synthetic construct
  source 1..42: mol_type = other DNA
acccgtgaattattcgaaggcgcggttcgccagattcgcctg

SEQ ID NO: 2679 - DNA, 42 bp, synthetic construct
  source 1..42: mol_type = other DNA
gaaaaaaccgttgaggcgtttgcggaggccgtgaaaacggtg

SEQ ID NO: 2680 - DNA, 42 bp, synthetic construct
  source 1..42: mol_type = other DNA
agcgatctggttgaccagggcaaagagcgcctgaatcgcctg

SEQ ID NO: 2681 - DNA, 42 bp, synthetic construct
  source 1..42: mol_type = other DNA
accgatgtggacgccgcgaatctgcgcgagacctttcgcaat

SEQ ID NO: 2682 - DNA, 42 bp, synthetic construct
  source 1..42: mol_type = other DNA
atgcgtgaacgcatcgaatttctgaacgaggcgagcgttatg

SEQ ID NO: 2683 - DNA, 42 bp, synthetic construct
  source 1..42: mol_type = other DNA
gaaaaagatcgcaacgatctgattacgtacctgaaaaaggcg

SEQ ID NO: 2684 - DNA, 42 bp, synthetic construct
  source 1..42: mol_type = other DNA
aaaagcaccgttttagcgaaagtgaaggagattctggacaat

SEQ ID NO: 2685 - DNA, 42 bp, synthetic construct
  source 1..42: mol_type = other DNA
ctgaccccgcgcaagcgtctgaaagagtctctggatcaaatt

SEQ ID NO: 2686 - DNA, 42 bp, synthetic construct
  source 1..42: mol_type = other DNA
gaagaaaccacggccaaactgatttactctaaagtgcgcacc

SEQ ID NO: 2687 - DNA, 42 bp, synthetic construct
  source 1..42: mol_type = other DNA
gatcgtgtgcgcgagagcctgtttaacatcgtgaccgcccgt

SEQ ID NO: 2688 - DNA, 42 bp, synthetic construct
  source 1..42: mol_type = other DNA
gatgtgaccttattaaaaaccctggacaaggcggtgaagacc

SEQ ID NO: 2689 - DNA, 42 bp, synthetic construct
  source 1..42: mol_type = other DNA
gaaaaaaccgttgagctgctgcgtaacgttctgaaagagagc

SEQ ID NO: 2690 - DNA, 42 bp, synthetic construct
  source 1..42: mol_type = other DNA
ggcagcaaagagatcgataccgtgatcgagctgaaaaagcat

SEQ ID NO: 2691 - DNA, 42 bp, synthetic construct
  source 1..42: mol_type = other DNA
cgtgcggtgaacaacgaatatgtgaaggttatgcgtgaaaaa

SEQ ID NO: 2692 - DNA, 42 bp, synthetic construct
  source 1..42: mol_type = other DNA
gaaattacctctaagaaaattgcgcgcgagcgtattgacgcg

SEQ ID NO: 2693 - DNA, 42 bp, synthetic construct
  source 1..42: mol_type = other DNA
gaagatatttctaagaaaattgcgcaagagcgtatggatgcg

SEQ ID NO: 2694 - DNA, 42 bp, synthetic construct
  source 1..42: mol_type = other DNA
tggggcgtgacgaaggcggcggaaaagcaaatgaaagataaa

SEQ ID NO: 2695 - DNA, 42 bp, synthetic construct
  source 1..42: mol_type = other DNA
agcgatctggtttacgaaaccattaaccgcgtgaaacgcatt

SEQ ID NO: 2696 - DNA, 42 bp, synthetic construct
  source 1..42: mol_type = other DNA
ccgaaagaaatccaaattcagattcgcaagtttgtgggtgaa

SEQ ID NO: 2697 - DNA, 42 bp, synthetic construct
  source 1..42: mol_type = other DNA
gaaaaagatcgcaacgatagcattacgtacctgaaaaaggcg

SEQ ID NO: 2698 - DNA, 42 bp, synthetic construct
  source 1..42: mol_type = other DNA
accagcgtgaaggttaaagaagcggttgaggcggtgcgcgat

SEQ ID NO: 2699 - DNA, 42 bp, synthetic construct
  source 1..42: mol_type = other DNA
accagcgcggtttacaatgaactggaccgcctgcgtgaggtg

SEQ ID NO: 2700 - DNA, 42 bp, synthetic construct
  source 1..42: mol_type = other DNA
gataaagtggccttaaattggctgaaaggtttaaaagaaaat

SEQ ID NO: 2701 - DNA, 42 bp, synthetic construct
  source 1..42: mol_type = other DNA
aatcgtatgattgactctgtgctggaatctgcccgtgatatg

SEQ ID NO: 2702 - DNA, 42 bp, synthetic construct
  source 1..42: mol_type = other DNA
ctgagcgtgatgaaggagacctatgaaacggttatgaaaaaa

SEQ ID NO: 2703 - DNA, 42 bp, synthetic construct
  source 1..42: mol_type = other DNA
ctgtatcagcgcatcgcgaaaattgtttctattgatgacgat

SEQ ID NO: 2704 - DNA, 42 bp, synthetic construct
  source 1..42: mol_type = other DNA
gaagaaacccaacgcacctttctgaaggaggtgaaagttatg

SEQ ID NO: 2705 - DNA, 42 bp, synthetic construct
  source 1..42: mol_type = other DNA
ccggaaaccgccgagaccctgtataaggagattcgtaaggtg

SEQ ID NO: 2706 - DNA, 42 bp, synthetic construct
  source 1..42: mol_type = other DNA
ctggatgcggttcgcaccctgaaaacggttattgatgagaaa

SEQ ID NO: 2707 - DNA, 42 bp, synthetic construct
  source 1..42: mol_type = other DNA
cgtaccgcggttaagaaagtgattgaccaactgaaattagaa

SEQ ID NO: 2708 - DNA, 42 bp, synthetic construct
  source 1..42: mol_type = other DNA
ccggcgcgtgttgttcagctgtttcgcgacgtggaacaaaaa

SEQ ID NO: 2709 - DNA, 42 bp, synthetic construct
  source 1..42: mol_type = other DNA
catagcgaaacggttgcgaaacatggtgccaaactgtctgcg

SEQ ID NO: 2710 - DNA, 42 bp, synthetic construct
  source 1..42: mol_type = other DNA
agcgcgcatttagaccgtctgcagaaggccgcggataagatt

SEQ ID NO: 2711 - DNA, 42 bp, synthetic construct
  source 1..42: mol_type = other DNA
ggcaaaaccttagacaccgcgaaagccgttgcggatgagctg

SEQ ID NO: 2712 - DNA, 42 bp, synthetic construct
  source 1..42: mol_type = other DNA
gaaagcatgaataaggagctgaaaaaaatcatcggccaggtg

SEQ ID NO: 2713 - DNA, 42 bp, synthetic construct
  source 1..42: mol_type = other DNA
catgataaagccatcgaagcgtatgagaagaccatttctatt

SEQ ID NO: 2714 - DNA, 42 bp, synthetic construct
  source 1..42: mol_type = other DNA
ctggataccgttcgcgaagaagtgaagacgctgaaagagcgt

SEQ ID NO: 2715 - DNA, 42 bp, synthetic construct
  source 1..42: mol_type = other DNA
aataatcgtatggagttaaaagcggcgatcgagggcctgaaa

SEQ ID NO: 2716 - DNA, 42 bp, synthetic construct
  source 1..42: mol_type = other DNA
aaaaatgtggccgccgcggaacgtcaattacgtgaattagaa

SEQ ID NO: 2717 - DNA, 42 bp, synthetic construct
  source 1..42: mol_type = other DNA
ctgaccgaaacggttggcgaactggttcgcgtggcggagcgt

SEQ ID NO: 2718 - DNA, 42 bp, synthetic construct
  source 1..42: mol_type = other DNA
gatatgtgggtgacgatcgataaacgtatggccgagattacc

SEQ ID NO: 2719 - DNA, 42 bp, synthetic construct
  source 1..42: mol_type = other DNA
ccgctgaaaacggcccatgatgtgcgcgttacctttgcccgt

SEQ ID NO: 2720 - DNA, 42 bp, synthetic construct
  source 1..42: mol_type = other DNA
ccgcatgatacgttaaatcgtattaagaagtatctgttaacc

SEQ ID NO: 2721 - DNA, 42 bp, synthetic construct
  source 1..42: mol_type = other DNA
gaaaataccgccatccatcattatttagaggcgctgaaggtg

SEQ ID NO: 2722 - DNA, 42 bp, synthetic construct
  source 1..42: mol_type = other DNA
attggcgatacggccaaaaaactgggtgagatgtggagcgaa

SEQ ID NO: 2723 - DNA, 42 bp, synthetic construct
  source 1..42: mol_type = other DNA
agcctggataaggccaaagcgctgaaggagcagctggagaaa

SEQ ID NO: 2724 - DNA, 42 bp, synthetic construct
  source 1..42: mol_type = other DNA
gcgcgtcaggacttccagcgtgaagccgagctgctgacgatg

SEQ ID NO: 2725 - DNA, 42 bp, synthetic construct
  source 1..42: mol_type = other DNA
tttcgtgatttagccctgcgtgtggaccaaattcgtgaccag

SEQ ID NO: 2726 - DNA, 42 bp, synthetic construct
  source 1..42: mol_type = other DNA
catgatattaaggaggattttagcaacttaattcgtacgctg

SEQ ID NO: 2727 - DNA, 42 bp, synthetic construct
  source 1..42: mol_type = other DNA
gaacgtacccgcaagaccggcgaagccttcgcggcgggtctg

SEQ ID NO: 2728 - DNA, 42 bp, synthetic construct
  source 1..42: mol_type = other DNA
ccgcatcagttacgccatagctttgccacgcatatgctggaa

SEQ ID NO: 2729 - DNA, 42 bp, synthetic construct
  source 1..42: mol_type = other DNA
aaaaccctggccggtcagctgcattctgagctgaaagagttt

SEQ ID NO: 2730 - DNA, 42 bp, synthetic construct
  source 1..42: mol_type = other DNA
ctgtatgatgccttagaaaaagcgcgcgacctgctgaacaat

SEQ ID NO: 2731 - DNA, 42 bp, synthetic construct
  source 1..42: mol_type = other DNA
tggcgtgcggccatgcgcaaagcggatacggccctgagcgaa

SEQ ID NO: 2732 - DNA, 42 bp, synthetic construct
  source 1..42: mol_type = other DNA
gatgaaaccttattcaaaaccctgatccgcgcgaaagagctg

SEQ ID NO: 2733 - DNA, 42 bp, synthetic construct
  source 1..42: mol_type = other DNA
gtgcaggaaggtgttgataaaattcgccactttcaggagctg

SEQ ID NO: 2734 - DNA, 42 bp, synthetic construct
  source 1..42: mol_type = other DNA
cgtgaagcgcacgagaccctggcgatcgccatgaatcgtctg

SEQ ID NO: 2735 - DNA, 42 bp, synthetic construct
  source 1..42: mol_type = other DNA
accgatcagttagttcgttttattgacgaggcgcatcgcgcg

SEQ ID NO: 2736 - DNA, 42 bp, synthetic construct
  source 1..42: mol_type = other DNA
gatcaggaacgccaagtgtttcagaaggccctgggcaagctg

SEQ ID NO: 2737 - DNA, 42 bp, synthetic construct
  source 1..42: mol_type = other DNA
aaaacccatttattacaggcggcgggtaacgaagcgaagaaa

SEQ ID NO: 2738 - DNA, 42 bp, synthetic construct
  source 1..42: mol_type = other DNA
catgaatttttatctaaagtgagccaccgcattgtgaacgaa

SEQ ID NO: 2739 - DNA, 42 bp, synthetic construct
  source 1..42: mol_type = other DNA
gataccatgaaacaagcctttgatcgtatgacgaagctgcgt

SEQ ID NO: 2740 - DNA, 42 bp, synthetic construct
  source 1..42: mol_type = other DNA
ctggaagaattattcagcaaaattaagaacaccctgaaggtg

SEQ ID NO: 2741 - DNA, 42 bp, synthetic construct
  source 1..42: mol_type = other DNA
gatattgtgcgcgagcgtgcgattaagttcctgagcacgaaa

SEQ ID NO: 2742 - DNA, 42 bp, synthetic construct
  source 1..42: mol_type = other DNA
gtgaccaaaatcaaggaagtgcagcgcatcgcggtggaggaa

SEQ ID NO: 2743 - DNA, 42 bp, synthetic construct
  source 1..42: mol_type = other DNA
cgtgcgagcttaaagaaactgattgactaccatgtggccagc

SEQ ID NO: 2744 - DNA, 42 bp, synthetic construct
  source 1..42: mol_type = other DNA
ccggcggaattcgttgatattaaacaccgcctgacccaaatt

SEQ ID NO: 2745 - DNA, 42 bp, synthetic construct
  source 1..42: mol_type = other DNA
ctgcgtgatatcgttcgtgcgaatgagcgcggcattcaagcg

SEQ ID NO: 2746 - DNA, 42 bp, synthetic construct
  source 1..42: mol_type = other DNA
ctgggcccgcacgaggcgaatctgttcgacatgcgtcagaaa

SEQ ID NO: 2747 - DNA, 42 bp, synthetic construct
  source 1..42: mol_type = other DNA
ccgattaaacacgttagcctgatggatcaacgcgcgcgtcag

SEQ ID NO: 2748 - DNA, 42 bp, synthetic construct
  source 1..42: mol_type = other DNA
gatctgctgaagcacaccaccaatgttgttaaagcgcacacc

SEQ ID NO: 2749 - DNA, 42 bp, synthetic construct
  source 1..42: mol_type = other DNA
aatgaaacccgcgagaaactgcatcaattagaaaaatctctg

SEQ ID NO: 2750 - DNA, 42 bp, synthetic construct
  source 1..42: mol_type = other DNA
gataaagtgcgcgagaaaattaccttagttgaagaaaagacc

SEQ ID NO: 2751 - DNA, 42 bp, synthetic construct
  source 1..42: mol_type = other DNA
agcgaagtgcgcgagcagattaatgccaaggtggcggagtgg

SEQ ID NO: 2752 - DNA, 42 bp, synthetic construct
  source 1..42: mol_type = other DNA
cgtaaaattacggacgatctggtgaagaacgtggaaaagctg

SEQ ID NO: 2753 - DNA, 42 bp, synthetic construct
  source 1..42: mol_type = other DNA
aatcagctggactctcagcgtctgaaggagcgtctgtacaat

SEQ ID NO: 2754 - DNA, 42 bp, synthetic construct
  source 1..42: mol_type = other DNA
aaaaaagaattagaggtgctgagccaaaagctgcgtgccctg

SEQ ID NO: 2755 - DNA, 42 bp, synthetic construct
  source 1..42: mol_type = other DNA
accgcgctggccgacaccggcgcgaagttacatgataagtat

SEQ ID NO: 2756 - DNA, 42 bp, synthetic construct
  source 1..42: mol_type = other DNA
gaagtgattgacaagattcagaaaaagacgcgtgaattcctg

SEQ ID NO: 2757 - DNA, 42 bp, synthetic construct
  source 1..42: mol_type = other DNA
ccgcaggaaaaggacattagcagcaagttactgaaagccctg

SEQ ID NO: 2758 - DNA, 42 bp, synthetic construct
  source 1..42: mol_type = other DNA
ccgtatagctctcgcctgaaaaaaatcggtgaactgttagat

SEQ ID NO: 2759 - DNA, 42 bp, synthetic construct
  source 1..42: mol_type = other DNA
ccgtatagctctcgcctgaaaaaagttggtgaactgttagat

SEQ ID NO: 2760 - DNA, 42 bp, synthetic construct
  source 1..42: mol_type = other DNA
cgtgcgaaagttttaggcgcgcgtaacttacatgaattaacc

SEQ ID NO: 2761 - DNA, 42 bp, synthetic construct
  source 1..42: mol_type = other DNA
aaagaactgcacacggaactggaacaagccggccgtttcgtg

SEQ ID NO: 2762 - DNA, 42 bp, synthetic construct
  source 1..42: mol_type = other DNA
gaaagcgtgcgcgacgcgctggtgcgcgcccaggattacatt

SEQ ID NO: 2763 - DNA, 42 bp, synthetic construct
  source 1..42: mol_type = other DNA
gatcagctgcgcgccggctatgtggcccgcgcgagcgagcgt

SEQ ID NO: 2764 - DNA, 42 bp, synthetic construct
  source 1..42: mol_type = other DNA
agcgaaggcttaaagagcgtggtggaccacattaaagccaat

SEQ ID NO: 2765 - DNA, 42 bp, synthetic construct
  source 1..42: mol_type = other DNA
ccgcgtgaagttatcgaagcgattaagaacctggcgaagacc

SEQ ID NO: 2766 - DNA, 42 bp, synthetic construct
  source 1..42: mol_type = other DNA
ctgaaagatgccatcaatgaagcgatgcgcgactgggtgacc

SEQ ID NO: 2767 - DNA, 42 bp, synthetic construct
  source 1..42: mol_type = other DNA
tatgcgctgcgcaagcatctggtggagttagcgaaaacgaat

SEQ ID NO: 2768 - DNA, 42 bp, synthetic construct
  source 1..42: mol_type = other DNA
tgggaacgtttattagaaaaacgtcaaatcggcgcggacacc

SEQ ID NO: 2769 - DNA, 42 bp, synthetic construct
  source 1..42: mol_type = other DNA
cagaatggcttagagcaggcgaaaaagttccatgaagccgtg

SEQ ID NO: 2770 - DNA, 42 bp, synthetic construct
  source 1..42: mol_type = other DNA
ctggatgaatctgttggcaaaatttggcaaaagctggtggat

SEQ ID NO: 2771 - DNA, 42 bp, synthetic construct
  source 1..42: mol_type = other DNA
ctggaaaaaacgcacgaactgaaagaggttctgaataaggtg

SEQ ID NO: 2772 - DNA, 42 bp, synthetic construct
  source 1..42: mol_type = other DNA
aatcgtggcttagagattgcgaaaatcgccgaaaaagttagc

SEQ ID NO: 2773 - DNA, 42 bp, synthetic construct
  source 1..42: mol_type = other DNA
gaacagctggagaacgaaattattaaggccggcaaagccagc

SEQ ID NO: 2774 - DNA, 42 bp, synthetic construct
  source 1..42: mol_type = other DNA
cgtgaaagccaattaaatgatgcgatcaagattctgaacgaa

SEQ ID NO: 2775 - DNA, 42 bp, synthetic construct
  source 1..42: mol_type = other DNA
agcgatcagcgcgacgcgattgtgaagggtctgaaagccaaa

SEQ ID NO: 2776 - DNA, 42 bp, synthetic construct
  source 1..42: mol_type = other DNA
gcgacccaggttttaaaagaactggaggaggcgaaaaaggcg

SEQ ID NO: 2777 - DNA, 42 bp, synthetic construct
  source 1..42: mol_type = other DNA
gatagcgtgacggcccgtctgcgtgaggttgaacatcgcgcg

SEQ ID NO: 2778 - DNA, 42 bp, synthetic construct
  source 1..42: mol_type = other DNA
ccgggcgaacgcgacgcgctgctggccaacgaagcgacgaaa

SEQ ID NO: 2779 - DNA, 42 bp, synthetic construct
  source 1..42: mol_type = other DNA
aatagcaaagccaaggaaaatgcggagacgaccctgttacgt

SEQ ID NO: 2780 - DNA, 42 bp, synthetic construct
  source 1..42: mol_type = other DNA
attaccgaaacggccaaaaaatgggtgccagagatgcgtgaa

SEQ ID NO: 2781 - DNA, 42 bp, synthetic construct
  source 1..42: mol_type = other DNA
tttgaaaatttaatcccgattctgaagacggtgcatgagaaa

SEQ ID NO: 2782 - DNA, 42 bp, synthetic construct
  source 1..42: mol_type = other DNA
aataaagaagccaaggcgtgggcgaaaggtgttctggaaaat

SEQ ID NO: 2783 - DNA, 42 bp, synthetic construct
  source 1..42: mol_type = other DNA
gatgtgagcaagacgattaaagaagccatcgaaaccacgatt

SEQ ID NO: 2784 - DNA, 42 bp, synthetic construct
  source 1..42: mol_type = other DNA
agcatggaattattaaaacaggcgtacgacaaagtgcgcgaa

SEQ ID NO: 2785 - DNA, 42 bp, synthetic construct
  source 1..42: mol_type = other DNA
aaacaggaattcgacacccatatggcgaacggtaaagatacc

SEQ ID NO: 2786 - DNA, 42 bp, synthetic construct
  source 1..42: mol_type = other DNA
cgtagcaaaggtaaggaagtgatggaatctttcattaaagcg

SEQ ID NO: 2787 - DNA, 42 bp, synthetic construct
  source 1..42: mol_type = other DNA
caggaaaaagccaagaccctgctggacaaggcgctgacgcag

SEQ ID NO: 2788 - DNA, 42 bp, synthetic construct
  source 1..42: mol_type = other DNA
acccatctggccgacgtgctggtgtctaagcagtttcacgaa

SEQ ID NO: 2789 - DNA, 42 bp, synthetic construct
  source 1..42: mol_type = other DNA
gtggataaaatccgcgaatttctgcaaaagattagcaaggaa

SEQ ID NO: 2790 - DNA, 42 bp, synthetic construct
  source 1..42: mol_type = other DNA
cgtgcgcgtatccacgcgctgctggaccaagtggcggagagc

SEQ ID NO: 2791 - DNA, 42 bp, synthetic construct
  source 1..42: mol_type = other DNA
ccggatgtgacgcgcgatattctggttaacctggataaggtg

SEQ ID NO: 2792 - DNA, 42 bp, synthetic construct
  source 1..42: mol_type = other DNA
attgataccgttttatatatgaaagaaaaggccaccaaagcg

SEQ ID NO: 2793 - DNA, 42 bp, synthetic construct
  source 1..42: mol_type = other DNA
gaactgtttcgcaaggaagcgaccaagttaattggccaaatt

SEQ ID NO: 2794 - DNA, 42 bp, synthetic construct
  source 1..42: mol_type = other DNA
tttattaaaatcaacgatctggcggagcaaattgaaaagatt

SEQ ID NO: 2795 - DNA, 42 bp, synthetic construct
  source 1..42: mol_type = other DNA
aaagatcgtatcggttttagcatgatttctgacgcggaaaaa

SEQ ID NO: 2796 - DNA, 42 bp, synthetic construct
  source 1..42: mol_type = other DNA
ctggaaaaagccaaggaaaccattttatctattctgaagaaa

SEQ ID NO: 2797 - DNA, 42 bp, synthetic construct
  source 1..42: mol_type = other DNA
gaaaaagtgcgcgagagcctgcgtttaacgtttcatgacgcg

SEQ ID NO: 2798 - DNA, 42 bp, synthetic construct
  source 1..42: mol_type = other DNA
cagcagcgtgacttccagcgtgaaatccaaattctgaaggcg

SEQ ID NO: 2799 - DNA, 42 bp, synthetic construct
  source 1..42: mol_type = other DNA
ccgcatgaattaacgcgtgtggcgtctgccctgcgtaagctg

SEQ ID NO: 2800 - DNA, 42 bp, synthetic construct
  source 1..42: mol_type = other DNA
accgaacatttagacgcggtgtttcaacgcatgaaaaccgaa

SEQ ID NO: 2801 - DNA, 42 bp, synthetic construct
  source 1..42: mol_type = other DNA
gaaaaaattcaaaaggaagcgcaggaggccctggaaaagctg

SEQ ID NO: 2802 - DNA, 42 bp, synthetic construct
  source 1..42: mol_type = other DNA
ccggaaaatacgcgcctgtttgaaatggttaagcgtaaagaa

SEQ ID NO: 2803 - DNA, 42 bp, synthetic construct
  source 1..42: mol_type = other DNA
cagacccatgccaagcgtgcgtatcgcgagctggtgttaatg

SEQ ID NO: 2804 - DNA, 42 bp, synthetic construct
  source 1..42: mol_type = other DNA
atggcgaatatgcgcgccgtgcgtgaattaacggaagcgcat

SEQ ID NO: 2805 - DNA, 42 bp, synthetic construct
  source 1..42: mol_type = other DNA
gataccaaattagccgaatataccgacttaatgctgaaactg

SEQ ID NO: 2806 - DNA, 42 bp, synthetic construct
  source 1..42: mol_type = other DNA
cagcatgaacgctacgtggaacagttaaagcaggcgttaaaa

SEQ ID NO: 2807 - DNA, 42 bp, synthetic construct
  source 1..42: mol_type = other DNA
agcgaaaaaggtatcgcggatattcgcgccctgctgcaaaaa

SEQ ID NO: 2808 - DNA, 42 bp, synthetic construct
  source 1..42: mol_type = other DNA
catgaagtgtctttactgagcgcggagggtgtgctgcgccat

SEQ ID NO: 2809 - DNA, 42 bp, synthetic construct
  source 1..42: mol_type = other DNA
ctggaagaagccaaggaaaatctgtacaaggcggcgtctctg

SEQ ID NO: 2810 - DNA, 42 bp, synthetic construct
  source 1..42: mol_type = other DNA
gaaagcaaagttgaggcgctggatgagttagtgaccaagaaa

SEQ ID NO: 2811 - DNA, 42 bp, synthetic construct
  source 1..42: mol_type = other DNA
gtgcgtcatcaacgcgcggtggaaaaccgcctgcgtgaggcg

SEQ ID NO: 2812 - DNA, 42 bp, synthetic construct
  source 1..42: mol_type = other DNA
gcggaagaattatctaaagcggtggttgagaccgtgcgcgcg

SEQ ID NO: 2813 - DNA, 42 bp, synthetic construct
  source 1..42: mol_type = other DNA
ccgattcgtgacaaggaagcgattcgcgttctgagcgacacc

SEQ ID NO: 2814 - DNA, 42 bp, synthetic construct
  source 1..42: mol_type = other DNA
aaagaaagcatcgaccgtattattcaagttgcgaaagagacc

SEQ ID NO: 2815 - DNA, 42 bp, synthetic construct
  source 1..42: mol_type = other DNA
gaaaaagtgaagggtattgaagaattaatcaccaattacagc

SEQ ID NO: 2816 - DNA, 42 bp, synthetic construct
  source 1..42: mol_type = other DNA
gcggaacagaagaaggaactgagcgacatcgcgctgcgcatt

SEQ ID NO: 2817 - DNA, 42 bp, synthetic construct
  source 1..42: mol_type = other DNA
accgaacatcacgagcgtgcggaacgcgtttttaatttactg

SEQ ID NO: 2818 - DNA, 42 bp, synthetic construct
  source 1..42: mol_type = other DNA
gatgcgaatgttaagcgtgtggcggacttaattaaagagagc

SEQ ID NO: 2819 - DNA, 42 bp, synthetic construct
  source 1..42: mol_type = other DNA
gtggaaagcgccgttacccgtgtgaaggccatgatggatgaa

SEQ ID NO: 2820 - DNA, 42 bp, synthetic construct
  source 1..42: mol_type = other DNA
ctggaacgtcaagtttatgaactggagaagctgcaggagaaa

SEQ ID NO: 2821 - DNA, 42 bp, synthetic construct
  source 1..42: mol_type = other DNA
gaagaaaatcgcaaggcggtgagcgaccaactgaaaaagcat

SEQ ID NO: 2822 - DNA, 42 bp, synthetic construct
  source 1..42: mol_type = other DNA
ggcaaaaatgccgagctgattagcgagaagattctgaaggaa

SEQ ID NO: 2823 - DNA, 42 bp, synthetic construct
  source 1..42: mol_type = other DNA
gaacagctgttacgcaaagcggaagcccaagcgaaaaaggaa

SEQ ID NO: 2824 - DNA, 42 bp, synthetic construct
  source 1..42: mol_type = other DNA
aaagataatgccgacaccctggcggcccgcgcgaaaaacgcg

SEQ ID NO: 2825 - DNA, 42 bp, synthetic construct
  source 1..42: mol_type = other DNA
cgtaccgaacgcgacaaactgatgcagacggttgcgcatgtg

SEQ ID NO: 2826 - DNA, 42 bp, synthetic construct
  source 1..42: mol_type = other DNA
agccatgatcgcttacgtgtgcatcaaatcgcggaagagcat

SEQ ID NO: 2827 - DNA, 42 bp, synthetic construct
  source 1..42: mol_type = other DNA
agcctggtggtttctgaactgagcttaaagctgcgtaaggaa

SEQ ID NO: 2828 - DNA, 42 bp, synthetic construct
  source 1..42: mol_type = other DNA
attgatgaaggtgttaaaattgtgttagagattaccaagagc

SEQ ID NO: 2829 - DNA, 42 bp, synthetic construct
  source 1..42: mol_type = other DNA
ccgcgtaccgttgaggtgcatcgtgccaacgtgatggcgaaa

SEQ ID NO: 2830 - DNA, 42 bp, synthetic construct
  source 1..42: mol_type = other DNA
aaagaagtgttaaaggaaagcgcgaagacgattgtggacagc

SEQ ID NO: 2831 - DNA, 42 bp, synthetic construct
  source 1..42: mol_type = other DNA
aatggccagttatggaagaaagtgaaagactctctgattgat

SEQ ID NO: 2832 - DNA, 42 bp, synthetic construct
  source 1..42: mol_type = other DNA
gatgtggaacgcgccattgaaaccttaatcaaaaatttccat

SEQ ID NO: 2833 - DNA, 42 bp, synthetic construct
  source 1..42: mol_type = other DNA
gaatttcaggactctctgaaaaaagttgagaaagcgtctctg

SEQ ID NO: 2834 - DNA, 42 bp, synthetic construct
  source 1..42: mol_type = other DNA
gtggataaaacgttccatgatctggttcgcgtgattcgccag

SEQ ID NO: 2835 - DNA, 42 bp, synthetic construct
  source 1..42: mol_type = other DNA
gcgaccgcgcaaatggaggaaaaactgcgcgactttacccgt

SEQ ID NO: 2836 - DNA, 42 bp, synthetic construct
  source 1..42: mol_type = other DNA
ccggaacagaagaaggaactgagcgacatcgcgcatcgcatt

SEQ ID NO: 2837 - DNA, 42 bp, synthetic construct
  source 1..42: mol_type = other DNA
gaaaccgaaaaggttcaggaatttcaacgcctgctgaaggaa

SEQ ID NO: 2838 - DNA, 42 bp, synthetic construct
  source 1..42: mol_type = other DNA
agcaccaccgaccaacgtgaacagggtttcaaaagcgagatg

SEQ ID NO: 2839 - DNA, 42 bp, synthetic construct
  source 1..42: mol_type = other DNA
gataatggcgagcaacgtaaaggcggtgccctgaaagccttt

SEQ ID NO: 2840 - DNA, 42 bp, synthetic construct
  source 1..42: mol_type = other DNA
catgcggatatctacgataaagtgtctggtgatatgcagaaa

SEQ ID NO: 2841 - DNA, 42 bp, synthetic construct
  source 1..42: mol_type = other DNA
caggcgacccgcaaccgtgtggaaaaggccgcgcgtgaggtg

SEQ ID NO: 2842 - DNA, 42 bp, synthetic construct
  source 1..42: mol_type = other DNA
gaagcggtgcaaaaggaactgctggccgagtggaaacgtacc

SEQ ID NO: 2843 - DNA, 42 bp, synthetic construct
  source 1..42: mol_type = other DNA
tttcgtgcgatggcctctgatcagcgtgagttaatgcgtacc

SEQ ID NO: 2844 - DNA, 42 bp, synthetic construct
  source 1..42: mol_type = other DNA
attgatgatggtttacgtaaaaccatcgagtggaccaaagcg

SEQ ID NO: 2845 - DNA, 42 bp, synthetic construct
  source 1..42: mol_type = other DNA
ctggcggatttccgccagaccattgacaaggtggatgccatt

SEQ ID NO: 2846 - DNA, 42 bp, synthetic construct
  source 1..42: mol_type = other DNA
aaagtgacccgcgccattattgaaaacgaggtggataagatt

SEQ ID NO: 2847 - DNA, 42 bp, synthetic construct
  source 1..42: mol_type = other DNA
agcagccgtttaaaggatgtggaagccggtctgaaaatcatt

SEQ ID NO: 2848 - DNA, 42 bp, synthetic construct
  source 1..42: mol_type = other DNA
ccggtgctggacgagtttgtgaatcacttaaatcgtttacgt

SEQ ID NO: 2849 - DNA, 42 bp, synthetic construct
  source 1..42: mol_type = other DNA
ccgaaagaacgcacggaatggattaaagccatccagatggcg

SEQ ID NO: 2850 - DNA, 42 bp, synthetic construct
  source 1..42: mol_type = other DNA
attccgcaggccgagaaactggatcaaatgttaaaagaacag

SEQ ID NO: 2851 - DNA, 42 bp, synthetic construct
  source 1..42: mol_type = other DNA
gaaaaagcgacgttagaatggctgaaagccatgaagaccaat

SEQ ID NO: 2852 - DNA, 42 bp, synthetic construct
  source 1..42: mol_type = other DNA
aaagatctggttttaagcgtgcataaccgcgcgattcgcaat

SEQ ID NO: 2853 - DNA, 42 bp, synthetic construct
  source 1..42: mol_type = other DNA
cgtgatgatatgttagcctggattaaaaccatccaagaaagc

SEQ ID NO: 2854 - DNA, 42 bp, synthetic construct
  source 1..42: mol_type = other DNA
cagaaaaaagccgacgcgctgaatgccgagcatattcgcatg

SEQ ID NO: 2855 - DNA, 42 bp, synthetic construct
  source 1..42: mol_type = other DNA
gtgggcgatttcacggtgcgtctgcgcgaccatctggacacc

SEQ ID NO: 2856 - DNA, 42 bp, synthetic construct
  source 1..42: mol_type = other DNA
gtgaatagcttaaagaaagcgctggaggagctgaaagagaaa

SEQ ID NO: 2857 - DNA, 42 bp, synthetic construct
  source 1..42: mol_type = other DNA
acctatagcatcacgaaacgtgtgaaggaggtgctgacggat

SEQ ID NO: 2858 - DNA, 42 bp, synthetic construct
  source 1..42: mol_type = other DNA
gaaaccgcgttattagattggctgggcacgatgcgcgaaaaa

SEQ ID NO: 2859 - DNA, 42 bp, synthetic construct
  source 1..42: mol_type = other DNA
gataatgaaaagaaccgtaaactgttcgacctgctggacgtg

SEQ ID NO: 2860 - DNA, 42 bp, synthetic construct
  source 1..42: mol_type = other DNA
gatccgacccgcgagcgtctgaaagccgccgcgcagtctatt

SEQ ID NO: 2861 - DNA, 42 bp, synthetic construct
  source 1..42: mol_type = other DNA
gtggatgaaatcgttgaaaatctgcgcaagcaggtgaaggcg

SEQ ID NO: 2862 - DNA, 42 bp, synthetic construct
  source 1..42: mol_type = other DNA
gtgccgctgacggttaaagaaatgaatcgcttaattgatgaa

SEQ ID NO: 2863 - DNA, 42 bp, synthetic construct
  source 1..42: mol_type = other DNA
gcggaacaggttgttcagggcatgaaagaggcccaggaacgt

SEQ ID NO: 2864 - DNA, 42 bp, synthetic construct
  source 1..42: mol_type = other DNA
cgtgaactggcccgccagaccctggaggttgtgcaggagatg

SEQ ID NO: 2865 - DNA, 42 bp, synthetic construct
  source 1..42: mol_type = other DNA
gcgaaagatgttgacagccgtgcgcgcgaggtgatttctaaa

SEQ ID NO: 2866 - DNA, 42 bp, synthetic construct
  source 1..42: mol_type = other DNA
agcaccgtgcgcgagcagctgaaaaagaagctggtggaggtg

SEQ ID NO: 2867 - DNA, 42 bp, synthetic construct
  source 1..42: mol_type = other DNA
gaaaaacaggccaaggaagtgctgaagcaacattttgagaaa

SEQ ID NO: 2868 - DNA, 42 bp, synthetic construct
  source 1..42: mol_type = other DNA
accgtgctggttcaccgtgtgcattcttacctggaacgccat

SEQ ID NO: 2869 - DNA, 42 bp, synthetic construct
  source 1..42: mol_type = other DNA
ccgcatcatttagcccaggcggaacgcaacgtgcgtgccttt

SEQ ID NO: 2870 - DNA, 42 bp, synthetic construct
  source 1..42: mol_type = other DNA
gtggaacgtggtatcaccagcctgcaccacgcgctggagctg

SEQ ID NO: 2871 - DNA, 42 bp, synthetic construct
  source 1..42: mol_type = other DNA
gatgaagaacgcaagaccatgatgaatctgatggttgccgcg

SEQ ID NO: 2872 - DNA, 42 bp, synthetic construct
  source 1..42: mol_type = other DNA
gaaggcacctaccgccagctgattcgcttacatcagacggaa

SEQ ID NO: 2873 - DNA, 42 bp, synthetic construct
  source 1..42: mol_type = other DNA
cagaatctgttagacgaactggataaccgcattattaagaat

SEQ ID NO: 2874 - DNA, 42 bp, synthetic construct
  source 1..42: mol_type = other DNA
gaaaaaaccttaatcaataaaattgccgagctgaaaaagttt

SEQ ID NO: 2875 - DNA, 42 bp, synthetic construct
  source 1..42: mol_type = other DNA
ctggatgaaatcaacaaaaaagaattatctattaaagaggcg

SEQ ID NO: 2876 - DNA, 42 bp, synthetic construct
  source 1..42: mol_type = other DNA
aaagcgagcttaaactggcatcagcgtaagcacgcggaaacc

SEQ ID NO: 2877 - DNA, 42 bp, synthetic construct
  source 1..42: mol_type = other DNA
aaagataccatggccaagattagcaatgagttacatgcgatt

SEQ ID NO: 2878 - DNA, 42 bp, synthetic construct
  source 1..42: mol_type = other DNA
cgtgataccttagagcgtaccgcggacgagattcgtgccgcg

SEQ ID NO: 2879 - DNA, 42 bp, synthetic construct
  source 1..42: mol_type = other DNA
ccgaaactgacgatggagtatgtggaacaagccattaaaaaa

SEQ ID NO: 2880 - DNA, 42 bp, synthetic construct
  source 1..42: mol_type = other DNA
ccggaactgatccaaccgattcaggacaagattaaaaacgaa

SEQ ID NO: 2881 - DNA, 42 bp, synthetic construct
  source 1..42: mol_type = other DNA
agcaaaaatgagttaagccgtgcgttcaagagcctgttagaa

SEQ ID NO: 2882 - DNA, 42 bp, synthetic construct
  source 1..42: mol_type = other DNA
ggcgaagcgcacacgcgtatgcgtcgtttattcaatgcggtg

SEQ ID NO: 2883 - DNA, 42 bp, synthetic construct
  source 1..42: mol_type = other DNA
catcgtgaacacatgcaacgtctgcatgactctgcgaaaatt

SEQ ID NO: 2884 - DNA, 42 bp, synthetic construct
  source 1..42: mol_type = other DNA
ccggatattgagaagcaggtgatgcgtcaattcgcggatacc

SEQ ID NO: 2885 - DNA, 42 bp, synthetic construct
  source 1..42: mol_type = other DNA
aaaagcaccgttacgggcctggtgaagcgcctggaagccgat

SEQ ID NO: 2886 - DNA, 42 bp, synthetic construct
  source 1..42: mol_type = other DNA
cgtgaaaaagcccaagaactggtgaacgccgcgcatgagttt

SEQ ID NO: 2887 - DNA, 42 bp, synthetic construct
  source 1..42: mol_type = other DNA
gtggatcagaaggttaaaagcacccaagacgtgctgaagagc

SEQ ID NO: 2888 - DNA, 42 bp, synthetic construct
  source 1..42: mol_type = other DNA
gatctgctgcaacacaccgcgaatgttgttaaagcgcacaaa

SEQ ID NO: 2889 - DNA, 42 bp, synthetic construct
  source 1..42: mol_type = other DNA
gcgaaagatgaccgcgtgtttcagttagccgtgagcgacctg

SEQ ID NO: 2890 - DNA, 42 bp, synthetic construct
  source 1..42: mol_type = other DNA
agcgcggatcgcgagaaactggaacgcttcagccattctgaa

SEQ ID NO: 2891 - DNA, 42 bp, synthetic construct
  source 1..42: mol_type = other DNA
gcggaaaccgttggtcgtgtgaaacgcttcattcaggaggcg

SEQ ID NO: 2892 - DNA, 42 bp, synthetic construct
  source 1..42: mol_type = other DNA
cgtcagaaagccgagcaggtggcggacgagatttatcaagcg

SEQ ID NO: 2893 - DNA, 42 bp, synthetic construct
  source 1..42: mol_type = other DNA
gtgctgagcaagttactgcgtgattctcacgtgctgcacagc

SEQ ID NO: 2894 - DNA, 42 bp, synthetic construct
  source 1..42: mol_type = other DNA
attgaaaataaggccgcggattatttaaaggtgagcgccaaa

SEQ ID NO: 2895 - DNA, 42 bp, synthetic construct
  source 1..42: mol_type = other DNA
aaagaactgcgcgactggattgcgcagacgttaaatgatctg

SEQ ID NO: 2896 - DNA, 42 bp, synthetic construct
  source 1..42: mol_type = other DNA
gaacgtcagatcaagaaacagaccgccttagtggaattagtg

SEQ ID NO: 2897 - DNA, 42 bp, synthetic construct
  source 1..42: mol_type = other DNA
ggcgaactgggtcaagcggtgagcgagggtcgtaaaaaggaa

SEQ ID NO: 2898 - DNA, 42 bp, synthetic construct
  source 1..42: mol_type = other DNA
gaaaaaaccggtgttgataaaattgttgagcatgtgaagagc

SEQ ID NO: 2899 - DNA, 42 bp, synthetic construct
  source 1..42: mol_type = other DNA
gcgcatgatcgcaacctggcgagcttagttgaaaaatacctg

SEQ ID NO: 2900 - DNA, 42 bp, synthetic construct
  source 1..42: mol_type = other DNA
tataatctggccttagataaagcgatccaaaaactgcacgat

SEQ ID NO: 2901 - DNA, 42 bp, synthetic construct
  source 1..42: mol_type = other DNA
gaaaataccatcaagaccacccgtcgcgttctggaattagtg

SEQ ID NO: 2902 - DNA, 42 bp, synthetic construct
  source 1..42: mol_type = other DNA
ctggatgtgcgcatgcaactgaaagaattagcccagaaagaa

SEQ ID NO: 2903 - DNA, 42 bp, synthetic construct
  source 1..42: mol_type = other DNA
gatgatcagttaaagagccatgtgcgcggtgcgctgaacgcg

SEQ ID NO: 2904 - DNA, 42 bp, synthetic construct
  source 1..42: mol_type = other DNA
gaaggccagttaaagctggcgctgaagacgctggaaaaggcg

SEQ ID NO: 2905 - DNA, 42 bp, synthetic construct
  source 1..42: mol_type = other DNA
gaaaccggcaaggagaaactgctgatctctaaaattttcacc

SEQ ID NO: 2906 - DNA, 42 bp, synthetic construct
  source 1..42: mol_type = other DNA
cgtctgtatcgcgagctgcaggcggttgccgaaagcttaaaa

SEQ ID NO: 2907 - DNA, 42 bp, synthetic construct
  source 1..42: mol_type = other DNA
aatgtgctgacggcccgtgtgctggacaagctggataagtat

SEQ ID NO: 2908 - DNA, 42 bp, synthetic construct
  source 1..42: mol_type = other DNA
ctgaatgatgccatgaacaaagcgaccaagttcctgaaagat

SEQ ID NO: 2909 - DNA, 42 bp, synthetic construct
  source 1..42: mol_type = other DNA
ctggcggcggcccgccagcatgcgcgcgacgtgctggaccag

SEQ ID NO: 2910 - DNA, 42 bp, synthetic construct
  source 1..42: mol_type = other DNA
caggaaattcaagttctgcgtgtggttaagaattttgagcat

SEQ ID NO: 2911 - DNA, 42 bp, synthetic construct
  source 1..42: mol_type = other DNA
acctgggatttagttgcggatattgagcgcctgcgtacgcat

SEQ ID NO: 2912 - DNA, 42 bp, synthetic construct
  source 1..42: mol_type = other DNA
cgtgaagaagccatcagcaatatggtggttgccctgaaagaa

SEQ ID NO: 2913 - DNA, 42 bp, synthetic construct
  source 1..42: mol_type = other DNA
gaaacctataagtctaatctgaaaatcgccgaactgaagctg

SEQ ID NO: 2914 - DNA, 45 bp, synthetic construct
  source 1..45: mol_type = other DNA
gaagcggatttatctaaagaactggccatccaggtgcgcaaagtg

SEQ ID NO: 2915 - DNA, 45 bp, synthetic construct
  source 1..45: mol_type = other DNA
gtggaagaagttaacgcgctgaaaaacgagattctgaaggcgcat

SEQ ID NO: 2916 - DNA, 45 bp, synthetic construct
  source 1..45: mol_type = other DNA
aaaaaaattacgcaatggctggaaaccaagggtgtggaacgcctg

SEQ ID NO: 2917 - DNA, 45 bp, synthetic construct
  source 1..45: mol_type = other DNA
gaagatctgcgcacgaaagtggaaaacacgaccaaaaagattttt

SEQ ID NO: 2918 - DNA, 45 bp, synthetic construct
  source 1..45: mol_type = other DNA
ccgaccaaattcgccgaaattgtggaggagaatctgaagagcgcg

SEQ ID NO: 2919 - DNA, 45 bp, synthetic construct
  source 1..45: mol_type = other DNA
gtgtttgaaacgttaaaagaagtgtctcgcctggtgttagcgcgt

SEQ ID NO: 2920 - DNA, 45 bp, synthetic construct
  source 1..45: mol_type = other DNA
cagattcagcgcgagctgaaaaaattagagcagcgtttaaccgcg

SEQ ID NO: 2921 - DNA, 45 bp, synthetic construct
  source 1..45: mol_type = other DNA
gcgaaagaaaagacggatctggtgcaaaagtttggcgagagcctg

SEQ ID NO: 2922 - DNA, 45 bp, synthetic construct
  source 1..45: mol_type = other DNA
catcgtgaattatgggccaaaattgcgaactctattaatgacatt

SEQ ID NO: 2923 - DNA, 45 bp, synthetic construct
  source 1..45: mol_type = other DNA
tggcaggatatctctatgatgcgtatgaaaaccatcggtgaacat

SEQ ID NO: 2924 - DNA, 45 bp, synthetic construct
  source 1..45: mol_type = other DNA
acccagaatttagccaaatttgcggttgacgaagaaaacaaaatt

SEQ ID NO: 2925 - DNA, 45 bp, synthetic construct
  source 1..45: mol_type = other DNA
agcgaaaaagccgttcgtgaactgttcgcccgtgcgcgcgatagc

SEQ ID NO: 2926 - DNA, 45 bp, synthetic construct
  source 1..45: mol_type = other DNA
cgtggcaccaaggccctgatggatgaagttgttaaagcgacgagc

SEQ ID NO: 2927 - DNA, 45 bp, synthetic construct
  source 1..45: mol_type = other DNA
ctgcatcaggccatgcgcgcggcgggcgacgagtttgaaacgcgt

SEQ ID NO: 2928 - DNA, 45 bp, synthetic construct
  source 1..45: mol_type = other DNA
ctggaagaaacgaagggccagattaacaacagcattaaggatctg

SEQ ID NO: 2929 - DNA, 45 bp, synthetic construct
  source 1..45: mol_type = other DNA
agcaccgaagttgccgaacgtgcgcgcgacctggtgcgcgcgacc

SEQ ID NO: 2930 - DNA, 45 bp, synthetic construct
  source 1..45: mol_type = other DNA
cgtgatgcgacgttagcgcaggcgaaggagctgtgggcgaaggtg

SEQ ID NO: 2931 - DNA, 45 bp, synthetic construct
  source 1..45: mol_type = other DNA
gaacgtctgcacaaccagctgaaagccttaaaacaggacctggcg

SEQ ID NO: 2932 - DNA, 45 bp, synthetic construct
  source 1..45: mol_type = other DNA
atggatgatttcatcaaagcgctgcgcacgattaaagagaaaagc

SEQ ID NO: 2933 - DNA, 45 bp, synthetic construct
  source 1..45: mol_type = other DNA
agcgatgaagttcaactgattaaaaagacgtgggaaattccagtg

SEQ ID NO: 2934 - DNA, 45 bp, synthetic construct
  source 1..45: mol_type = other DNA
ccggaaagcgacaagctgaaaagcgagggtaatgcggccatggcg

SEQ ID NO: 2935 - DNA, 45 bp, synthetic construct
  source 1..45: mol_type = other DNA
gtgaaatataagaacgtggcgaaagaggttgcgaatgacattaaa

SEQ ID NO: 2936 - DNA, 45 bp, synthetic construct
  source 1..45: mol_type = other DNA
cgtaccgaattattagatattgcggccacgctgtttgccgaacgt

SEQ ID NO: 2937 - DNA, 45 bp, synthetic construct
  source 1..45: mol_type = other DNA
cgtcagctggaggccctgattcgtttatctgaagcgcacgcgcgt

SEQ ID NO: 2938 - DNA, 45 bp, synthetic construct
  source 1..45: mol_type = other DNA
cgtgaaaccaagacgctgattgtggaggccattgtgcgcgaaacc

SEQ ID NO: 2939 - DNA, 45 bp, synthetic construct
  source 1..45: mol_type = other DNA
gcggatgaagttaaggcgatgattaaagaggttgtgagccaattt

SEQ ID NO: 2940 - DNA, 45 bp, synthetic construct
  source 1..45: mol_type = other DNA
ctggatgaagttgttgcgatgcagaaaccattcgtgcagaagcat

SEQ ID NO: 2941 - DNA, 45 bp, synthetic construct
  source 1..45: mol_type = other DNA
gcgagcaaatctatcagcgatatttctttcgaagtggaccgtctg

SEQ ID NO: 2942 - DNA, 45 bp, synthetic construct
  source 1..45: mol_type = other DNA
catagcaccaacgttctgctgagcttaaacgatcagcgcaaaaaa

SEQ ID NO: 2943 - DNA, 45 bp, synthetic construct
  source 1..45: mol_type = other DNA
gaagaaaccgcccaaaaagtgattaagttactgaatgccctggaa

SEQ ID NO: 2944 - DNA, 45 bp, synthetic construct
  source 1..45: mol_type = other DNA
cgtcaggcgttaggtgaagcgcgtgaggttattaaaaacctggcg

SEQ ID NO: 2945 - DNA, 45 bp, synthetic construct
  source 1..45: mol_type = other DNA
gaaagcgaaacgaagagcaccctgttattcggccagcgcgcgaaa

SEQ ID NO: 2946 - DNA, 45 bp, synthetic construct
  source 1..45: mol_type = other DNA
gcggaagaacgcaaggaactgcgtacgcaatttcaggacaccacc

SEQ ID NO: 2947 - DNA, 45 bp, synthetic construct
  source 1..45: mol_type = other DNA
ccggatgaacgcttaaaactggcgcaagcctataaagagaaaacc

SEQ ID NO: 2948 - DNA, 45 bp, synthetic construct
  source 1..45: mol_type = other DNA
ctgagccagttccgcaaaattgtggacaaggtggatcaaaccgcg

SEQ ID NO: 2949 - DNA, 45 bp, synthetic construct
  source 1..45: mol_type = other DNA
gatgatctgcacgttggcctggcgcgcttatggcagcgtttaacc

SEQ ID NO: 2950 - DNA, 45 bp, synthetic construct
  source 1..45: mol_type = other DNA
gatagcctgatgaagacgcaggcggaattattactggaacgcctg

SEQ ID NO: 2951 - DNA, 45 bp, synthetic construct
  source 1..45: mol_type = other DNA
gatcgtcagaacaaggcgtataaagaggccatggaagcgttaaaa

SEQ ID NO: 2952 - DNA, 45 bp, synthetic construct
  source 1..45: mol_type = other DNA
attgatgaataccgcgataccctgcgccacctggtggccaccacc

SEQ ID NO: 2953 - DNA, 45 bp, synthetic construct
  source 1..45: mol_type = other DNA
ggcgaaaaattatacaccggcctgcgcgaggtggtgacggaacat

SEQ ID NO: 2954 - DNA, 45 bp, synthetic construct
  source 1..45: mol_type = other DNA
gtgcaggatgccgttaaacagattatcgactatctggacaccaaa

SEQ ID NO: 2955 - DNA, 45 bp, synthetic construct
  source 1..45: mol_type = other DNA
gatggcgcggttaaggcgctggaaacgtggaagaccctgttagat

SEQ ID NO: 2956 - DNA, 45 bp, synthetic construct
  source 1..45: mol_type = other DNA
ccggaaaccgagaaggtgctgaaatacttagaagcgacggaacgt

SEQ ID NO: 2957 - DNA, 45 bp, synthetic construct
  source 1..45: mol_type = other DNA
catggcgaaatctctctggtgctgaacacgctgcgtgagaaagaa

SEQ ID NO: 2958 - DNA, 45 bp, synthetic construct
  source 1..45: mol_type = other DNA
gcgaatgatcacatcgcggtgctggttaagaaattttctctggaa

SEQ ID NO: 2959 - DNA, 45 bp, synthetic construct
  source 1..45: mol_type = other DNA
ccgctgagcttagttaaaaaactgaagaaggatggcttacaggat

SEQ ID NO: 2960 - DNA, 45 bp, synthetic construct
  source 1..45: mol_type = other DNA
ccgagcgatttacgcgaaaaactgtctgagctggcggacgcgaaa

SEQ ID NO: 2961 - DNA, 45 bp, synthetic construct
  source 1..45: mol_type = other DNA
accggcgtggttcgcgatagcatggcgaagttacgtgaacgcctg

SEQ ID NO: 2962 - DNA, 45 bp, synthetic construct
  source 1..45: mol_type = other DNA
cagcgtgatgccgagaataccatgcgtgagttagcggtgcgcgaa

SEQ ID NO: 2963 - DNA, 45 bp, synthetic construct
  source 1..45: mol_type = other DNA
ccggaacgtgttcgcccggcgctggagaacaccctgaaggatctg

SEQ ID NO: 2964 - DNA, 45 bp, synthetic construct
  source 1..45: mol_type = other DNA
agcgaaagcatccaaaaaaaatttcaattaatgaaagaacacgtg

SEQ ID NO: 2965 - DNA, 45 bp, synthetic construct
  source 1..45: mol_type = other DNA
gaaaataccgttaactttcatcagaagaacatgcagaaaaagatt

SEQ ID NO: 2966 - DNA, 45 bp, synthetic construct
  source 1..45: mol_type = other DNA
gatgaaattaagatcaaactgattaagacgctggcgttcaatgcg

SEQ ID NO: 2967 - DNA, 45 bp, synthetic construct
  source 1..45: mol_type = other DNA
tttgataccgccttaaccgatctgaagacgattattcgcgcggaa

SEQ ID NO: 2968 - DNA, 45 bp, synthetic construct
  source 1..45: mol_type = other DNA
accgatgatcgcatcaaaagctgggtggcccaactgaaatctgaa

SEQ ID NO: 2969 - DNA, 45 bp, synthetic construct
  source 1..45: mol_type = other DNA
cgtctggatcacaaccgtgcgatttctcaactggcggccaaaacc

SEQ ID NO: 2970 - DNA, 45 bp, synthetic construct
  source 1..45: mol_type = other DNA
gaaaaactgacgttcaaaaccgatttagagaaactggagcgtgaa

SEQ ID NO: 2971 - DNA, 45 bp, synthetic construct
  source 1..45: mol_type = other DNA
catcataccgcctctgaaagctttatgaagcacatgcagaatgaa

SEQ ID NO: 2972 - DNA, 45 bp, synthetic construct
  source 1..45: mol_type = other DNA
aaaaaactgttaaaggaagcgtttcaaaagaccctgacggatctg

SEQ ID NO: 2973 - DNA, 45 bp, synthetic construct
  source 1..45: mol_type = other DNA
gtggatcagatccgcaaaaattatcactctctggtgtctcagcgt

SEQ ID NO: 2974 - DNA, 45 bp, synthetic construct
  source 1..45: mol_type = other DNA
gatcgtgcgaacttcaccctgctgttagccgaactgcacaaagcg

SEQ ID NO: 2975 - DNA, 45 bp, synthetic construct
  source 1..45: mol_type = other DNA
gaaagcaataaggagaatcgtgaagcccacctggcggccatgctg

SEQ ID NO: 2976 - DNA, 45 bp, synthetic construct
  source 1..45: mol_type = other DNA
catggcagcgacttaggcaaaaaattattagaagcggccaatgtg

SEQ ID NO: 2977 - DNA, 45 bp, synthetic construct
  source 1..45: mol_type = other DNA
gcggcggatcgcttaaattatctgaaggacctgagccgcagccat

SEQ ID NO: 2978 - DNA, 45 bp, synthetic construct
  source 1..45: mol_type = other DNA
aaatttcaggaggccgtggaaaaagttacgcagcatatccatggc

SEQ ID NO: 2979 - DNA, 45 bp, synthetic construct
  source 1..45: mol_type = other DNA
cgtgcggcgtgggccgcccagctggcgcaattacgtgaagacgaa

SEQ ID NO: 2980 - DNA, 45 bp, synthetic construct
  source 1..45: mol_type = other DNA
atggatgaagttcaaaatcgtattaaggagattctggacaaacat

SEQ ID NO: 2981 - DNA, 45 bp, synthetic construct
  source 1..45: mol_type = other DNA
ccggaacgtgttacgcaggcgattcgcgagtggctgcgtaaggtg

SEQ ID NO: 2982 - DNA, 45 bp, synthetic construct
  source 1..45: mol_type = other DNA
aatgaaaaagttggtgaactgcaggccaaggcgctggttgatatt

SEQ ID NO: 2983 - DNA, 45 bp, synthetic construct
  source 1..45: mol_type = other DNA
gcgaatggctacttagataaactggcccaagaactgggtcgtaaa

SEQ ID NO: 2984 - DNA, 45 bp, synthetic construct
  source 1..45: mol_type = other DNA
cgtcaggcgatcttcgaaaccctggttgccaaaggccgcgaactg

SEQ ID NO: 2985 - DNA, 45 bp, synthetic construct
  source 1..45: mol_type = other DNA
ccggatcagcaacgcgattttcagcgcgagattcagatcctgaaa

SEQ ID NO: 2986 - DNA, 45 bp, synthetic construct
  source 1..45: mol_type = other DNA
gtgggcgaagtttctaaactggtgaagaaggcgctgtctaatgaa

SEQ ID NO: 2987 - DNA, 45 bp, synthetic construct
  source 1..45: mol_type = other DNA
ccgcagatggtgcgcgacacccagcagttattaaaagaaacgcgt

SEQ ID NO: 2988 - DNA, 45 bp, synthetic construct
  source 1..45: mol_type = other DNA
ctgaccaaacacttacaggtgtttcgcgaccatctgatcaatcag

SEQ ID NO: 2989 - DNA, 45 bp, synthetic construct
  source 1..45: mol_type = other DNA
gaagaaatgaccaagcaagcggaaaaatggatcaaggataatctg

SEQ ID NO: 2990 - DNA, 45 bp, synthetic construct
  source 1..45: mol_type = other DNA
cgtgaagaacgcgcccagctgattgccacggcgcgtaaggcggtg

SEQ ID NO: 2991 - DNA, 45 bp, synthetic construct
  source 1..45: mol_type = other DNA
accgaaagcgccaaggaagcgtatgttaagctgctggacaccctg

SEQ ID NO: 2992 - DNA, 45 bp, synthetic construct
  source 1..45: mol_type = other DNA
gaaaaagatcgcaacgatctgattacgtacctgaaaaaggcgacc

SEQ ID NO: 2993 - DNA, 45 bp, synthetic construct
  source 1..45: mol_type = other DNA
aaagcggatttaatcgcgaccgcgcgcaagacctgggatgagcgt

SEQ ID NO: 2994 - DNA, 45 bp, synthetic construct
  source 1..45: mol_type = other DNA
catgaaggccgcgccgcgcagaaacgcttagaaaccttactggaa

SEQ ID NO: 2995 - DNA, 45 bp, synthetic construct
  source 1..45: mol_type = other DNA
aaagaagcggccacggcggtggcgaaggcctttgaacaagaaacc

SEQ ID NO: 2996 - DNA, 45 bp, synthetic construct
  source 1..45: mol_type = other DNA
ctgggccatcaagttgcgagcgattacttacgtattatggagcgt

SEQ ID NO: 2997 - DNA, 45 bp, synthetic construct
  source 1..45: mol_type = other DNA
gtggaacagaacttaaaacatgtggttacgattaaacgcgaactg

SEQ ID NO: 2998 - DNA, 45 bp, synthetic construct
  source 1..45: mol_type = other DNA
atggaagaacacacgcaggtgattaaggagattattcgcgtggcg

SEQ ID NO: 2999 - DNA, 45 bp, synthetic construct
  source 1..45: mol_type = other DNA
gaacgtcaggttcgcattcagctgaaggaccatattgaccgtacc

SEQ ID NO: 3000 - DNA, 45 bp, synthetic construct
  source 1..45: mol_type = other DNA
gatgaagtgttcggtgcggtgaaagaccgccagcgtaacctgctg

SEQ ID NO: 3001 - DNA, 45 bp, synthetic construct
  source 1..45: mol_type = other DNA
ctgaaagaattagactttaaaattcgccaacagctggttaataat

SEQ ID NO: 3002 - DNA, 45 bp, synthetic construct
  source 1..45: mol_type = other DNA
accccgaatgagaagctgctgggccacttagtgaaagagaaatat

SEQ ID NO: 3003 - DNA, 45 bp, synthetic construct
  source 1..45: mol_type = other DNA
agcaaagaaaagtggaacgatattgatcaaatcgcgacctctctg

SEQ ID NO: 3004 - DNA, 45 bp, synthetic construct
  source 1..45: mol_type = other DNA
tggaaagaagacgttaaaaaaatgattgttttaagcctgacgcgt

SEQ ID NO: 3005 - DNA, 45 bp, synthetic construct
  source 1..45: mol_type = other DNA
ggccgtgatttaacggattatctgatgaagatcctgaccgagcgt

SEQ ID NO: 3006 - DNA, 45 bp, synthetic construct
  source 1..45: mol_type = other DNA
aaaagcctgatgaaggaggcgtttcagaagacgctgagcgacctg

SEQ ID NO: 3007 - DNA, 45 bp, synthetic construct
  source 1..45: mol_type = other DNA
gaagcggaaacgaagagcaccctgatgttcggtcagcgtgccaaa

SEQ ID NO: 3008 - DNA, 45 bp, synthetic construct
  source 1..45: mol_type = other DNA
tttaaagatatcaagaaaattatggaagagaagattcagatcagc

SEQ ID NO: 3009 - DNA, 45 bp, synthetic construct
  source 1..45: mol_type = other DNA
gatgaagtgcgcaagaccaatctggccggtctgatggatggttat

SEQ ID NO: 3010 - DNA, 45 bp, synthetic construct
  source 1..45: mol_type = other DNA
accgcgcgtttagaccgtctgatgctggagcgcgtgctggagcag

SEQ ID NO: 3011 - DNA, 45 bp, synthetic construct
  source 1..45: mol_type = other DNA
tatcgtgaagccgttctgcgtgcggttgaccgtctgaacgaacag

SEQ ID NO: 3012 - DNA, 45 bp, synthetic construct
  source 1..45: mol_type = other DNA
catggcgcggccacggcgaatgaatctttcaaacgtgcccgtgcg

SEQ ID NO: 3013 - DNA, 45 bp, synthetic construct
  source 1..45: mol_type = other DNA
attaaagaacgcacgattaaaattggtaagtatattgttgaaacc

SEQ ID NO: 3014 - DNA, 45 bp, synthetic construct
  source 1..45: mol_type = other DNA
gtgagcgatttaaagaaatatattgccgagctggaagttcagacc

SEQ ID NO: 3015 - DNA, 45 bp, synthetic construct
  source 1..45: mol_type = other DNA
agcgaagaaaaggttgcgctgtatcgccacgtggtgtctgtggtg

SEQ ID NO: 3016 - DNA, 45 bp, synthetic construct
  source 1..45: mol_type = other DNA
ctgccgattatcaaggatcatctgaacgacctgtatcgccaggcg

SEQ ID NO: 3017 - DNA, 45 bp, synthetic construct
  source 1..45: mol_type = other DNA
ctggcgacccaagccgtgcaggaaatcaagcatagcttagatcat

SEQ ID NO: 3018 - DNA, 45 bp, synthetic construct
  source 1..45: mol_type = other DNA
gaaaaagatacggttctggaagtgttaaagagctttcgccgtgcg

SEQ ID NO: 3019 - DNA, 45 bp, synthetic construct
  source 1..45: mol_type = other DNA
gaagtggcgtacttagatcgtgcgtctcaactggtgttacgtgat

SEQ ID NO: 3020 - DNA, 45 bp, synthetic construct
  source 1..45: mol_type = other DNA
ggcattaatatccgccagaaagtgaaggagctggtggagtttgcg

SEQ ID NO: 3021 - DNA, 45 bp, synthetic construct
  source 1..45: mol_type = other DNA
caggcgctgttagagcgtattcgtgccaaggaagtgcaaaaacag

SEQ ID NO: 3022 - DNA, 45 bp, synthetic construct
  source 1..45: mol_type = other DNA
ctgatgaaagacttaattcagaccgccttagaagaaatgcgccag

SEQ ID NO: 3023 - DNA, 45 bp, synthetic construct
  source 1..45: mol_type = other DNA
caggatgaagttaaggaactgaatcgcttactgggcaaggtgatt

SEQ ID NO: 3024 - DNA, 45 bp, synthetic construct
  source 1..45: mol_type = other DNA
cgtgatattgacgccatgaaaagcgtggccgaggcgagccacaaa

SEQ ID NO: 3025 - DNA, 45 bp, synthetic construct
  source 1..45: mol_type = other DNA
gaagcgagcatcgccattagccaggcccgcctggatgagaaaatt

SEQ ID NO: 3026 - DNA, 45 bp, synthetic construct
  source 1..45: mol_type = other DNA
ctggcgagccgcacgcgtcatctggcctctgtgctggacaaactg

SEQ ID NO: 3027 - DNA, 45 bp, synthetic construct
  source 1..45: mol_type = other DNA
ccgcaggtgacggttgataaactgaagcgcctggaaaacgatttt

SEQ ID NO: 3028 - DNA, 45 bp, synthetic construct
  source 1..45: mol_type = other DNA
ggcgcggaagccaacgcgattacccgcgagattctgaaggatatt

SEQ ID NO: 3029 - DNA, 45 bp, synthetic construct
  source 1..45: mol_type = other DNA
ccgaccacctctgcccgtgcgctgcgcgactttgtggttgaagat

SEQ ID NO: 3030 - DNA, 45 bp, synthetic construct
  source 1..45: mol_type = other DNA
cgtagcgatttacacgcgaccctggttgacgcggcgcgcgcggcg

SEQ ID NO: 3031 - DNA, 45 bp, synthetic construct
  source 1..45: mol_type = other DNA
cgtgatgatgccatcgcgtggaaaaccgccttaatggaagcgaat

SEQ ID NO: 3032 - DNA, 45 bp, synthetic construct
  source 1..45: mol_type = other DNA
ctgggcgcgttcgagcataatattcaaacgctgaaagaccgtctg

SEQ ID NO: 3033 - DNA, 45 bp, synthetic construct
  source 1..45: mol_type = other DNA
gtgcaggcgtctgaccgtctgatgaaagagttacgtgatatctat

SEQ ID NO: 3034 - DNA, 45 bp, synthetic construct
  source 1..45: mol_type = other DNA
ctggaagatttagttcgttatgtggagtctaaaatttctcgtacc

SEQ ID NO: 3035 - DNA, 45 bp, synthetic construct
  source 1..45: mol_type = other DNA
cgtggcaccaagtctctgatggatgaagttgttaaagcgacgagc

SEQ ID NO: 3036 - DNA, 45 bp, synthetic construct
  source 1..45: mol_type = other DNA
tataaagaagccgttctgcgtgcgatcgacggcattaaccagcgt

SEQ ID NO: 3037 - DNA, 45 bp, synthetic construct
  source 1..45: mol_type = other DNA
aaagatgatcaagccaaaaaagtgcaagagcatctgaacaaaacc

SEQ ID NO: 3038 - DNA, 45 bp, synthetic construct
  source 1..45: mol_type = other DNA
cgtgaaatggtggaccaaattaatcgtgttgcccgtcaggttatt

SEQ ID NO: 3039 - DNA, 45 bp, synthetic construct
  source 1..45: mol_type = other DNA
agccatgtggccgagcgtcaggcgcgcgccgcgaaagacgaactg

SEQ ID NO: 3040 - DNA, 45 bp, synthetic construct
  source 1..45: mol_type = other DNA
gataaaagcttagacacctttgtgtctaaggtgggcgagattgtg

SEQ ID NO: 3041 - DNA, 45 bp, synthetic construct
  source 1..45: mol_type = other DNA
gatcgtaccgccggtgtgctgcgtgacacgctggatcaactgtat

SEQ ID NO: 3042 - DNA, 45 bp, synthetic construct
  source 1..45: mol_type = other DNA
aaactggaaacgtacctgaataaagttgaggcggaagccaaagcg

SEQ ID NO: 3043 - DNA, 45 bp, synthetic construct
  source 1..45: mol_type = other DNA
accgaagaattaaagaattttctgaaggacctgctggagaaagcg

SEQ ID NO: 3044 - DNA, 45 bp, synthetic construct
  source 1..45: mol_type = other DNA
tataaaaaacgcttaaatgaactgatcacggatgcgttaattacc

SEQ ID NO: 3045 - DNA, 45 bp, synthetic construct
  source 1..45: mol_type = other DNA
attccggaattacgcgaacgtattaagaacgtggcggagaaaacc

SEQ ID NO: 3046 - DNA, 45 bp, synthetic construct
  source 1..45: mol_type = other DNA
ctgaccgaaaaggccattggcgatgttttcagcctgttagaaaaa

SEQ ID NO: 3047 - DNA, 45 bp, synthetic construct
  source 1..45: mol_type = other DNA
gatgaagcgatcaaccgtgcggcgatcaacgtgggcaagaaacgt

SEQ ID NO: 3048 - DNA, 45 bp, synthetic construct
  source 1..45: mol_type = other DNA
attgcggaaatctctcgtgaactgaagacgctggcgcgcgaactg

SEQ ID NO: 3049 - DNA, 45 bp, synthetic construct
  source 1..45: mol_type = other DNA
gaacgtgtgcaaaagcatctgaaagccttaaccagcgagctggcg

SEQ ID NO: 3050 - DNA, 45 bp, synthetic construct
  source 1..45: mol_type = other DNA
ccgaaagaaatgaaggagtttctggatgagcaccagaaaatgacc

SEQ ID NO: 3051 - DNA, 45 bp, synthetic construct
  source 1..45: mol_type = other DNA
gaagaaggccgcgaggcggtgagccaaatcgcggcgtctattaaa

SEQ ID NO: 3052 - DNA, 45 bp, synthetic construct
  source 1..45: mol_type = other DNA
gcggcggatttaaaggcggtgcaggacaagctgaaaacgtttgtg

SEQ ID NO: 3053 - DNA, 45 bp, synthetic construct
  source 1..45: mol_type = other DNA
aaagatgaagttaaggaactgatttggaagtctagcctggaggtg

SEQ ID NO: 3054 - DNA, 45 bp, synthetic construct
  source 1..45: mol_type = other DNA
attattccgcgcacgctgcatcagatcttcgaaaaattaaccgat

SEQ ID NO: 3055 - DNA, 45 bp, synthetic construct
  source 1..45: mol_type = other DNA
attaaagatgttcacgcgcgtctgcaagccctggcgcaagcgcat

SEQ ID NO: 3056 - DNA, 45 bp, synthetic construct
  source 1..45: mol_type = other DNA
gcgcatcaggttcaaaaacagaccttaaaggaaattttactgaaa

SEQ ID NO: 3057 - DNA, 45 bp, synthetic construct
  source 1..45: mol_type = other DNA
tttaaacagaagatcattagcattttagaggataaaaaggcggtg

SEQ ID NO: 3058 - DNA, 45 bp, synthetic construct
  source 1..45: mol_type = other DNA
ctggaaagctctcacgcgctggcgcacgccctgaaaatgatgcgt

SEQ ID NO: 3059 - DNA, 45 bp, synthetic construct
  source 1..45: mol_type = other DNA
atggtgagcgttgttcatgatctgcaaaaggcgattgccgaaaaa

SEQ ID NO: 3060 - DNA, 45 bp, synthetic construct
  source 1..45: mol_type = other DNA
gcggaagaaacgttaaaagcgctgaagggtagcgtgaaggatctg

SEQ ID NO: 3061 - DNA, 45 bp, synthetic construct
  source 1..45: mol_type = other DNA
cattggaatcgcttacgtgatgatgccgccaatctgaagagcaaa

SEQ ID NO: 3062 - DNA, 45 bp, synthetic construct
  source 1..45: mol_type = other DNA
tttgtggaaaacgttatgaaaaaagcgatcgacagcctgaaggaa

SEQ ID NO: 3063 - DNA, 45 bp, synthetic construct
  source 1..45: mol_type = other DNA
gaagaactggttaagtggggcaaacgtgttgccgcggcgaacagc

SEQ ID NO: 3064 - DNA, 45 bp, synthetic construct
  source 1..45: mol_type = other DNA
aaaagccgtttaatcgatcgtgcgtctcaactgctggaggtgatt

SEQ ID NO: 3065 - DNA, 45 bp, synthetic construct
  source 1..45: mol_type = other DNA
cgtgaaagcgttcaccgtctggtggagaacgtggcggagcgtttt

SEQ ID NO: 3066 - DNA, 45 bp, synthetic construct
  source 1..45: mol_type = other DNA
accccggatggtatcattaaagcggacaaggtgtttaacaaagtg

SEQ ID NO: 3067 - DNA, 45 bp, synthetic construct
  source 1..45: mol_type = other DNA
tatgatgatacggttcgtctgaccatgcaacacgcgcagcaacat

SEQ ID NO: 3068 - DNA, 45 bp, synthetic construct
  source 1..45: mol_type = other DNA
gcgcgtgtgcgcaaccagtttctgaaggagatggatggcttagcg

SEQ ID NO: 3069 - DNA, 45 bp, synthetic construct
  source 1..45: mol_type = other DNA
ctggcggatttccgccagaccattgacaaggtggatgccattgcg

SEQ ID NO: 3070 - DNA, 45 bp, synthetic construct
  source 1..45: mol_type = other DNA
gaagtgaaattattagtggaacgtatgatggccttacagaccgat

SEQ ID NO: 3071 - DNA, 45 bp, synthetic construct
  source 1..45: mol_type = other DNA
gtgaaagatcgcttagcggatattaagtctgaaattgacctgacc

SEQ ID NO: 3072 - DNA, 45 bp, synthetic construct
  source 1..45: mol_type = other DNA
cgtgatcattggaagcgcgtgatgcagggccacgccggcgcgaat

SEQ ID NO: 3073 - DNA, 45 bp, synthetic construct
  source 1..45: mol_type = other DNA
ggccgtgcggttaaccatattaaatctgtttggaaagatttactg

SEQ ID NO: 3074 - DNA, 45 bp, synthetic construct
  source 1..45: mol_type = other DNA
accctgattgaccaagcgaaagatcgcatccagaaaacgaaaagc

SEQ ID NO: 3075 - DNA, 45 bp, synthetic construct
  source 1..45: mol_type = other DNA
gtggaagaatggttaacgcatgcgcgtaaggttacccaggaggcg

SEQ ID NO: 3076 - DNA, 45 bp, synthetic construct
  source 1..45: mol_type = other DNA
catcgtgaacacatgcaacgtctgcatgactctgcgaaaatctat

SEQ ID NO: 3077 - DNA, 45 bp, synthetic construct
  source 1..45: mol_type = other DNA
ctgcaggcggttttaaaagaagatcaagagaaactgaagctgctg

SEQ ID NO: 3078 - DNA, 45 bp, synthetic construct
  source 1..45: mol_type = other DNA
agcccgatggcggaggccctgtttaaatctatcgcggaacgcgaa

SEQ ID NO: 3079 - DNA, 45 bp, synthetic construct
  source 1..45: mol_type = other DNA
cgtgaagaagttatcaaaaccctggttgacatggtggcgaagagc

SEQ ID NO: 3080 - DNA, 45 bp, synthetic construct
  source 1..45: mol_type = other DNA
cagctggaaaagttaatggaaaatatgcgtaacgacattgcgagc

SEQ ID NO: 3081 - DNA, 45 bp, synthetic construct
  source 1..45: mol_type = other DNA
cgtgatcaggttaagcagattctggttgagatggtggcgaagagc

SEQ ID NO: 3082 - DNA, 45 bp, synthetic construct
  source 1..45: mol_type = other DNA
ctggataccttaaagaaagatattgccttaggccaggagtttgtg

SEQ ID NO: 3083 - DNA, 45 bp, synthetic construct
  source 1..45: mol_type = other DNA
ccggcggaattacgcgcggcgggccgcgccgatctgacgacccgt

SEQ ID NO: 3084 - DNA, 45 bp, synthetic construct
  source 1..45: mol_type = other DNA
atgagcgcggtttctctgaaaattgttgagaaagcgaaggaagcg

SEQ ID NO: 3085 - DNA, 45 bp, synthetic construct
  source 1..45: mol_type = other DNA
ctgaaaggcgaggttgaaagcattaagaagcagattaaccgtcag

SEQ ID NO: 3086 - DNA, 45 bp, synthetic construct
  source 1..45: mol_type = other DNA
ctgaatgcgttccgcgaactgcgtacgcaactggaaaaggcgctg

SEQ ID NO: 3087 - DNA, 45 bp, synthetic construct
  source 1..45: mol_type = other DNA
gcgcaggaaatcgacctgaaagtgcgcaagtttctgatcgcgcag

SEQ ID NO: 3088 - DNA, 45 bp, synthetic construct
  source 1..45: mol_type = other DNA
cataccgcgttaaaggatattgcgaacaagtatagcgagaaaacc

SEQ ID NO: 3089 - DNA, 45 bp, synthetic construct
  source 1..45: mol_type = other DNA
aaagcgctggacaaggtggaaaaagttttagtgagcgcccagcag

SEQ ID NO: 3090 - DNA, 45 bp, synthetic construct
  source 1..45: mol_type = other DNA
catgatcatgccgttgtgagcggccgcttagcgggcgagaatatg

SEQ ID NO: 3091 - DNA, 45 bp, synthetic construct
  source 1..45: mol_type = other DNA
agcgaagatgccgttaatatggcgcgtgttttagcgctgaaggaa

SEQ ID NO: 3092 - DNA, 45 bp, synthetic construct
  source 1..45: mol_type = other DNA
gaagcggatatcgagcgtaccattgccgccgcgcgtacggtgctg

SEQ ID NO: 3093 - DNA, 45 bp, synthetic construct
  source 1..45: mol_type = other DNA
cgtaccgaagccgccaatgtggaaaagatcaccaccaagctgctg

SEQ ID NO: 3094 - DNA, 45 bp, synthetic construct
  source 1..45: mol_type = other DNA
ggcaaaaatgccgagctgattagcgagaagattctgaaggaaatg

SEQ ID NO: 3095 - DNA, 45 bp, synthetic construct
  source 1..45: mol_type = other DNA
aaaaccaccgttatcaatgaagtgtaccaccgtctggttaaagat

SEQ ID NO: 3096 - DNA, 45 bp, synthetic construct
  source 1..45: mol_type = other DNA
cgtagccatttacacgatgcgctggttaaccgtgcgcgcgcgctg

SEQ ID NO: 3097 - DNA, 45 bp, synthetic construct
  source 1..45: mol_type = other DNA
attatgcagatcttaacccgtgtgaacgaccgtgtggcccgtcat

SEQ ID NO: 3098 - DNA, 45 bp, synthetic construct
  source 1..45: mol_type = other DNA
ccgctgggcgacgccaatgaaaccaaggccctgaaacgcgcgttt

SEQ ID NO: 3099 - DNA, 45 bp, synthetic construct
  source 1..45: mol_type = other DNA
aattggcagaagcaaatgctggatcgtttaaacgaagcggttaaa

SEQ ID NO: 3100 - DNA, 45 bp, synthetic construct
  source 1..45: mol_type = other DNA
gatcgtctgcgccaatttattggcgagttagcgaccttactggat

SEQ ID NO: 3101 - DNA, 45 bp, synthetic construct
  source 1..45: mol_type = other DNA
aatggccatgccttactgatgaccgatacgcgcaaacgtttactg

SEQ ID NO: 3102 - DNA, 45 bp, synthetic construct
  source 1..45: mol_type = other DNA
atgggcgcgatcttagaaacccagcgcgagctgcgtgaggtgctg

SEQ ID NO: 3103 - DNA, 45 bp, synthetic construct
  source 1..45: mol_type = other DNA
catgatgcgttcatcgcgagcgtggacgagagcctgcgcaaactg

SEQ ID NO: 3104 - DNA, 45 bp, synthetic construct
  source 1..45: mol_type = other DNA
aaactgaccttcaagaccgatctggagaagctggaacgcgaaaaa

SEQ ID NO: 3105 - DNA, 45 bp, synthetic construct
  source 1..45: mol_type = other DNA
ccgcatgtgttacgccatgcgtttgccacgcatctgttaaatcat

SEQ ID NO: 3106 - DNA, 45 bp, synthetic construct
  source 1..45: mol_type = other DNA
ctggatcagatcgaccagcgtattgccgccgtgtttcaccatctg

SEQ ID NO: 3107 - DNA, 45 bp, synthetic construct
  source 1..45: mol_type = other DNA
cgtgaaaccttagagattagctatcgcaacgcgattgcccgtctg

SEQ ID NO: 3108 - DNA, 45 bp, synthetic construct
  source 1..45: mol_type = other DNA
gcggatgcgcgcaagaaactggaagactctgcggaattactgacc

SEQ ID NO: 3109 - DNA, 45 bp, synthetic construct
  source 1..45: mol_type = other DNA
agcgaagcggttgttcgtctggcggaggccagccaggaccgttat

SEQ ID NO: 3110 - DNA, 45 bp, synthetic construct
  source 1..45: mol_type = other DNA
aaagataaattccaccagctgctgcacgagctggtggagaaaaat

SEQ ID NO: 3111 - DNA, 45 bp, synthetic construct
  source 1..45: mol_type = other DNA
ccgcagaaagccatggaggaatataaagagaagctgaaagcccag

SEQ ID NO: 3112 - DNA, 45 bp, synthetic construct
  source 1..45: mol_type = other DNA
gatgcggaaacgttaagcaccctgcgcttcggcatgcgtgccaaa

SEQ ID NO: 3113 - DNA, 45 bp, synthetic construct
  source 1..45: mol_type = other DNA
atttatgaacaaatcgtgcagaaaatcaaggaacaggttgtgaaa

SEQ ID NO: 3114 - DNA, 45 bp, synthetic construct
  source 1..45: mol_type = other DNA
cgtgaaggcgttaaggaactggcgcgccaaaccgcggagctgctg

SEQ ID NO: 3115 - DNA, 45 bp, synthetic construct
  source 1..45: mol_type = other DNA
aaagataaattagccgaaattagctacgaggcggtgaagagcgtg

SEQ ID NO: 3116 - DNA, 45 bp, synthetic construct
  source 1..45: mol_type = other DNA
caggaagcggacacgctgcgttttgtttctgcgctgcgcgcgcgt

SEQ ID NO: 3117 - DNA, 45 bp, synthetic construct
  source 1..45: mol_type = other DNA
ctggaacatttagccgaacgtattgccaaccgtattaacagccag

SEQ ID NO: 3118 - DNA, 45 bp, synthetic construct
  source 1..45: mol_type = other DNA
cgtgcgaaattattaaatgtgggcttccaagaagcgttaaaagat

SEQ ID NO: 3119 - DNA, 45 bp, synthetic construct
  source 1..45: mol_type = other DNA
attgcgcaggcccgcaaactggtggagcaactgaaaatggaggcg

SEQ ID NO: 3120 - DNA, 45 bp, synthetic construct
  source 1..45: mol_type = other DNA
ccgattgtggagaagattctgcagtaccgcgaactgacgaaactg

SEQ ID NO: 3121 - DNA, 45 bp, synthetic construct
  source 1..45: mol_type = other DNA
ccgcgtctgcgcgaggcgattgcgcaaaagctgcagcgcgataat

SEQ ID NO: 3122 - DNA, 45 bp, synthetic construct
  source 1..45: mol_type = other DNA
acccataaattagccgatgatgtgttacaactgctggacaatcgt

SEQ ID NO: 3123 - DNA, 45 bp, synthetic construct
  source 1..45: mol_type = other DNA
gtggaaaaagttttaaaaacccgttaccacgatgcgacgagcaaa

SEQ ID NO: 3124 - DNA, 45 bp, synthetic construct
  source 1..45: mol_type = other DNA
gatgatcaggcccgccatctggcggacttaacccgtttaggcatg

SEQ ID NO: 3125 - DNA, 45 bp, synthetic construct
  source 1..45: mol_type = other DNA
gtggcggaatctaagaaactgctgaagaagatttttgaccagctg

SEQ ID NO: 3126 - DNA, 45 bp, synthetic construct
  source 1..45: mol_type = other DNA
gaaaaagcgttagagctggcggtggcccaaattgaaaagagctat

SEQ ID NO: 3127 - DNA, 45 bp, synthetic construct
  source 1..45: mol_type = other DNA
catcatcatcacatgcaacagattcagcgcgacattgcgcaagcg

SEQ ID NO: 3128 - DNA, 45 bp, synthetic construct
  source 1..45: mol_type = other DNA
ctgaaaaaaggtatcgatctgtttgagcaaattctgaagcagctg

SEQ ID NO: 3129 - DNA, 45 bp, synthetic construct
  source 1..45: mol_type = other DNA
agcaaaggcggtaacctgattgcggacgagctggcggagaaatat

SEQ ID NO: 3130 - DNA, 45 bp, synthetic construct
  source 1..45: mol_type = other DNA
ggcgataaagagttagaatggctgattggtcgcagcctgatccag

SEQ ID NO: 3131 - DNA, 45 bp, synthetic construct
  source 1..45: mol_type = other DNA
cgtgatcaggttttcgcggcggtggagcaagcgcgtaagaccctg

SEQ ID NO: 3132 - DNA, 45 bp, synthetic construct
  source 1..45: mol_type = other DNA
catagcgaaatcatcattaaagcgttcaaccgtgtggttgataaa

SEQ ID NO: 3133 - DNA, 45 bp, synthetic construct
  source 1..45: mol_type = other DNA
cgtgatcagttccgcagcaccctggccgacgcggcgaagaccctg

SEQ ID NO: 3134 - DNA, 45 bp, synthetic construct
  source 1..45: mol_type = other DNA
aaagaatttatcacgaatcgtattaacgacaccgtgaagaaagcg

SEQ ID NO: 3135 - DNA, 45 bp, synthetic construct
  source 1..45: mol_type = other DNA
gcgctggaatctaaggcgaaagtggaccaactggcgcaagattat

SEQ ID NO: 3136 - DNA, 45 bp, synthetic construct
  source 1..45: mol_type = other DNA
tgggaacatgccatcgataccgcgcgcgacctgaaaaacattctg

SEQ ID NO: 3137 - DNA, 45 bp, synthetic construct
  source 1..45: mol_type = other DNA
accggcgaacacttagaagtgctgtctaagctggcgggtaaattt

SEQ ID NO: 3138 - DNA, 45 bp, synthetic construct
  source 1..45: mol_type = other DNA
gaaaaaagcgttatggacggcgcgaaagccgttctggatacgctg

SEQ ID NO: 3139 - DNA, 45 bp, synthetic construct
  source 1..45: mol_type = other DNA
gaacatacccgcttacgtggcctggtttctgatgcgttcacccgt

SEQ ID NO: 3140 - DNA, 45 bp, synthetic construct
  source 1..45: mol_type = other DNA
accgatgatgttaagagcattgtgcgcttcgtgcaggagcatagc

SEQ ID NO: 3141 - DNA, 45 bp, synthetic construct
  source 1..45: mol_type = other DNA
gcggaagatgttaaggtgctgaaatctgttaaaaaacaaattagc

SEQ ID NO: 3142 - DNA, 45 bp, synthetic construct
  source 1..45: mol_type = other DNA
gaaaaagatcgcaacgatctgattacgtacctgaaaaaggcgagc

SEQ ID NO: 3143 - DNA, 45 bp, synthetic construct
  source 1..45: mol_type = other DNA
attagcgataagttaatggtgcatctggttgagcgtgtgcaacgt

SEQ ID NO: 3144 - DNA, 45 bp, synthetic construct
  source 1..45: mol_type = other DNA
cgtgtgggcttcgacgcgctgctgcgcgagcatgtgtctacccat

SEQ ID NO: 3145 - DNA, 45 bp, synthetic construct
  source 1..45: mol_type = other DNA
ggcagccatatggccgttagcaaagtgatggagaagattctgcgt

SEQ ID NO: 3146 - DNA, 45 bp, synthetic construct
  source 1..45: mol_type = other DNA
gaagcgagccgcaagagcctgtatgacttaaccaaatctctggtg

SEQ ID NO: 3147 - DNA, 45 bp, synthetic construct
  source 1..45: mol_type = other DNA
gaagcgcagaagacgctggcggaagaggttaccaaattcattcat

SEQ ID NO: 3148 - DNA, 45 bp, synthetic construct
  source 1..45: mol_type = other DNA
atggaagtgttaaagcgtgtgctgaagtctatggatgaaacggcg

SEQ ID NO: 3149 - DNA, 45 bp, synthetic construct
  source 1..45: mol_type = other DNA
ccgggcgaattcaagaccctgatttctaaggaacgtaagagccat

SEQ ID NO: 3150 - DNA, 45 bp, synthetic construct
  source 1..45: mol_type = other DNA
gcgagcggcgaggcccgtcgtaatggtgccaccgaagcctttaaa

SEQ ID NO: 3151 - DNA, 45 bp, synthetic construct
  source 1..45: mol_type = other DNA
aatgcggaagccttaattctggaaatgaacttaattaaaaagcat

SEQ ID NO: 3152 - DNA, 45 bp, synthetic construct
  source 1..45: mol_type = other DNA
gaaaaagcgttagagctggcgatggcgcaaatcgataaaaacttt

SEQ ID NO: 3153 - DNA, 45 bp, synthetic construct
  source 1..45: mol_type = other DNA
tatggcgatttaaaggcgcgtgtggaccaagtgcgtcaagcgacc

SEQ ID NO: 3154 - DNA, 45 bp, synthetic construct
  source 1..45: mol_type = other DNA
ctgaaagaaacgatcgatgataccgcctctcagattttaaaattt

SEQ ID NO: 3155 - DNA, 45 bp, synthetic construct
  source 1..45: mol_type = other DNA
gaaattgcgaaggagacccaggcgcgcgttctggaaacgattctg

SEQ ID NO: 3156 - DNA, 45 bp, synthetic construct
  source 1..45: mol_type = other DNA
gtgcagctggacacggcggtggtgcgcgccctgcgtgagcgtttt

SEQ ID NO: 3157 - DNA, 45 bp, synthetic construct
  source 1..45: mol_type = other DNA
aataaagaaggtttagaactgctgaagacggcgattggtaaagcg

SEQ ID NO: 3158 - DNA, 45 bp, synthetic construct
  source 1..45: mol_type = other DNA
ctgagcaccgcccaaaaaattattaaggaggcgcgtgacgcgctg

SEQ ID NO: 3159 - DNA, 45 bp, synthetic construct
  source 1..45: mol_type = other DNA
ccgctgagcttagttcgtgatcatcgcgccaaagatgttctgacc

SEQ ID NO: 3160 - DNA, 45 bp, synthetic construct
  source 1..45: mol_type = other DNA
cgtaaaagcatcaagcagctggcggaggttgcggaacgcgaaatg

SEQ ID NO: 3161 - DNA, 45 bp, synthetic construct
  source 1..45: mol_type = other DNA
cgtagcgatttaaacgcgcgtattttaaagagcgtggttgatcag

SEQ ID NO: 3162 - DNA, 45 bp, synthetic construct
  source 1..45: mol_type = other DNA
gaaattgcgaaggagacccaggcgcgcgttctggaagccattctg

SEQ ID NO: 3163 - DNA, 45 bp, synthetic construct
  source 1..45: mol_type = other DNA
gaaaaagtggagtctgaaattaaaaaggttgaaaatttcctgcgt

SEQ ID NO: 3164 - DNA, 45 bp, synthetic construct
  source 1..45: mol_type = other DNA
caggcgctgcgcgaggcgattgcgcaaaagaccgaacgcctgtat

SEQ ID NO: 3165 - DNA, 45 bp, synthetic construct
  source 1..45: mol_type = other DNA
aaactggatgcccaaattaaaaatatctctgatgcgttaggcaaa

SEQ ID NO: 3166 - DNA, 45 bp, synthetic construct
  source 1..45: mol_type = other DNA
gaaaaactggacgcccagattaaaaacatcagcgatgccctgggc

SEQ ID NO: 3167 - DNA, 45 bp, synthetic construct
  source 1..45: mol_type = other DNA
gatcagcatcgccaagaactggtgaactgggttgataaagttggc

SEQ ID NO: 3168 - DNA, 45 bp, synthetic construct
  source 1..45: mol_type = other DNA
cgtgaagaagccatcagcaatatggtggttgccctgaaagagctg

SEQ ID NO: 3169 - DNA, 45 bp, synthetic construct
  source 1..45: mol_type = other DNA
aaagaaaccgttgaggcgtggagcgcgcgcatcaaagaacaactg

SEQ ID NO: 3170 - DNA, 45 bp, synthetic construct
  source 1..45: mol_type = other DNA
ggccagcaggaggccgcgcgtgcgggtgagctgctgaaggaaaaa

SEQ ID NO: 3171 - DNA, 45 bp, synthetic construct
  source 1..45: mol_type = other DNA
aaagaaaccaagggtcatatttttcgcgccgtggaaaacgcgctg

SEQ ID NO: 3172 - DNA, 45 bp, synthetic construct
  source 1..45: mol_type = other DNA
agcaaagtgatcatcgatcgtgtgacggagtatctggagagccat

SEQ ID NO: 3173 - DNA, 45 bp, synthetic construct
  source 1..45: mol_type = other DNA
agcgtgattggtcgcgaagcgaaagcccaaattctggaggcggaa

SEQ ID NO: 3174 - DNA, 45 bp, synthetic construct
  source 1..45: mol_type = other DNA
acctatgaaatgaaccgcattcaggatgccatcaaaaaattaaat

SEQ ID NO: 3175 - DNA, 45 bp, synthetic construct
  source 1..45: mol_type = other DNA
tgggtggataaggttaaagatctgacgaagagcgaaatgaacatt

SEQ ID NO: 3176 - DNA, 45 bp, synthetic construct
  source 1..45: mol_type = other DNA
cgtgaagaattaacggcggtgatgcgtttcttaacccagcgcctg

SEQ ID NO: 3177 - DNA, 45 bp, synthetic construct
  source 1..45: mol_type = other DNA
gtggatgatatcgttaccaaaattaagtcttataccacggaacag

SEQ ID NO: 3178 - DNA, 45 bp, synthetic construct
  source 1..45: mol_type = other DNA
ctgccggatgttgaccgtgcggtgttacgcacccaggccaaactg

SEQ ID NO: 3179 - DNA, 45 bp, synthetic construct
  source 1..45: mol_type = other DNA
cgtccggaacgcgagaaactgatgcagacggttagcagcatgttt

SEQ ID NO: 3180 - DNA, 45 bp, synthetic construct
  source 1..45: mol_type = other DNA
tataaaattgccacgagcattgataaggccattgatcgcattctg

SEQ ID NO: 3181 - DNA, 45 bp, synthetic construct
  source 1..45: mol_type = other DNA
gaaaaagatgttcaaaccgcgctggccttagcgaaaggtaaattt

SEQ ID NO: 3182 - DNA, 45 bp, synthetic construct
  source 1..45: mol_type = other DNA
cgtgaaaaagccttagaactggcgatggcccaaattgataagaat

SEQ ID NO: 3183 - DNA, 45 bp, synthetic construct
  source 1..45: mol_type = other DNA
gtgattatggatttaatccagcgtaccaaggacgcggtgcgcgaa

SEQ ID NO: 3184 - DNA, 45 bp, synthetic construct
  source 1..45: mol_type = other DNA
attaaaaaagttcgcgcgagcgtgttatacaatcaggacgaacat

SEQ ID NO: 3185 - DNA, 45 bp, synthetic construct
  source 1..45: mol_type = other DNA
aaagatgatgtttacgaaattagcaagttaattctgaagagcatt

SEQ ID NO: 3186 - DNA, 45 bp, synthetic construct
  source 1..45: mol_type = other DNA
ccggaagcggccacgcgtgcggtgttcaaggtgctgtctcgtgaa

SEQ ID NO: 3187 - DNA, 45 bp, synthetic construct
  source 1..45: mol_type = other DNA
accgtggaaatgttagttaaagtgatttctgagcataaaaaccgt

SEQ ID NO: 3188 - DNA, 45 bp, synthetic construct
  source 1..45: mol_type = other DNA
ctggaaagcgccatccagaaagtggttgagaaaatttctcatcgt

SEQ ID NO: 3189 - DNA, 45 bp, synthetic construct
  source 1..45: mol_type = other DNA
ccggaaattatcaacgaaatgacccgtatgcgcatggagatgctg

SEQ ID NO: 3190 - DNA, 45 bp, synthetic construct
  source 1..45: mol_type = other DNA
cgtggccagttcgacctgctgctgttaaagcatgcggaggaacag

SEQ ID NO: 3191 - DNA, 45 bp, synthetic construct
  source 1..45: mol_type = other DNA
ccggaactgaaggccaaaatggaaaccttaaaggaagtgatcacc

SEQ ID NO: 3192 - DNA, 45 bp, synthetic construct
  source 1..45: mol_type = other DNA
aatctggattctgcccgttttcgtcacttaatgggcgaaaagctg

SEQ ID NO: 3193 - DNA, 45 bp, synthetic construct
  source 1..45: mol_type = other DNA
accgatgtggccaacgaaattgaaaagaagattaaagagaaactg

SEQ ID NO: 3194 - DNA, 45 bp, synthetic construct
  source 1..45: mol_type = other DNA
cgtctggatcacaaccgtgcgctgtctcaaattgcggccaaaacc

SEQ ID NO: 3195 - DNA, 45 bp, synthetic construct
  source 1..45: mol_type = other DNA
ccggaacatacgatcgcggcggcgaaggttattctgaagaaaagc

SEQ ID NO: 3196 - DNA, 45 bp, synthetic construct
  source 1..45: mol_type = other DNA
aaaaatgcgcgcaacgattttctgaaggaggtgaaaatcatgagc

SEQ ID NO: 3197 - DNA, 45 bp, synthetic construct
  source 1..45: mol_type = other DNA
gaaaaagcggttgagaaagtggaaaagcaagtgaatgacgcggtg

SEQ ID NO: 3198 - DNA, 45 bp, synthetic construct
  source 1..45: mol_type = other DNA
aaagataaaatcatcgataatgcgatcacgctgttttctgaaaaa

SEQ ID NO: 3199 - DNA, 45 bp, synthetic construct
  source 1..45: mol_type = other DNA
ctgaaagatgccatcaatgaagcgttacgcgattgggtggccacc

SEQ ID NO: 3200 - DNA, 45 bp, synthetic construct
  source 1..45: mol_type = other DNA
acccatgcggaccacgcgcgtagcttccacgcgctgcaccagacc

SEQ ID NO: 3201 - DNA, 45 bp, synthetic construct
  source 1..45: mol_type = other DNA
gatgaaatttctgacaccctgcgtacgcgcctggtggccctgacc

SEQ ID NO: 3202 - DNA, 45 bp, synthetic construct
  source 1..45: mol_type = other DNA
ctgaaaagcacgttcgatgatattaagaagattatttctaaacag

SEQ ID NO: 3203 - DNA, 45 bp, synthetic construct
  source 1..45: mol_type = other DNA
gatgaacagcgcaagctgctgaaagaggcccaggcggagcataat

SEQ ID NO: 3204 - DNA, 45 bp, synthetic construct
  source 1..45: mol_type = other DNA
accaatgcgatgcaagacattgcgacccaattcaaaaaagagaaa

SEQ ID NO: 3205 - DNA, 45 bp, synthetic construct
  source 1..45: mol_type = other DNA
ggcggcattaaccgcaaacgtgcgttattagaactggagaaaagc

SEQ ID NO: 3206 - DNA, 45 bp, synthetic construct
  source 1..45: mol_type = other DNA
gcgaaagaacgcgccagcctgatgaaagcccacggcgaaacgggc

SEQ ID NO: 3207 - DNA, 45 bp, synthetic construct
  source 1..45: mol_type = other DNA
atgcgtgaacgcatcgaatttctgaacgaggcgagcgttatgaaa

SEQ ID NO: 3208 - DNA, 45 bp, synthetic construct
  source 1..45: mol_type = other DNA
cgtccgcgtatcacggaactggtgggtcaactgctggacgaactg

SEQ ID NO: 3209 - DNA, 45 bp, synthetic construct
  source 1..45: mol_type = other DNA
atgaccctggccaagcaggaagcgaagttagtgcatgagaaaatt

SEQ ID NO: 3210 - DNA, 45 bp, synthetic construct
  source 1..45: mol_type = other DNA
gtgaaagaagcccaagcggcggcggagcaactgaaaacgacccgt

SEQ ID NO: 3211 - DNA, 45 bp, synthetic construct
  source 1..45: mol_type = other DNA
gaaaaaagcgccttagcgtatctggagaagcataccgcccgtctg

SEQ ID NO: 3212 - DNA, 45 bp, synthetic construct
  source 1..45: mol_type = other DNA
gaagtgattgacaagattcagaaaaagacgcgtgaattcctgaat

SEQ ID NO: 3213 - DNA, 45 bp, synthetic construct
  source 1..45: mol_type = other DNA
agcgaacgttacggtcgtgtgattttagaccgtgtggagcagcgt

SEQ ID NO: 3214 - DNA, 45 bp, synthetic construct
  source 1..45: mol_type = other DNA
aaagtggatcgcatcctggcgctggccgagaccaatgccgaactg

SEQ ID NO: 3215 - DNA, 45 bp, synthetic construct
  source 1..45: mol_type = other DNA
gcgggcaccaaggagcgtatgcgtgatatcttacgtgaaatccag

SEQ ID NO: 3216 - DNA, 45 bp, synthetic construct
  source 1..45: mol_type = other DNA
agcaataaagagaaccgtgaagcgcacttagcggcgatgttagaa

SEQ ID NO: 3217 - DNA, 45 bp, synthetic construct
  source 1..45: mol_type = other DNA
aaactgcattctcaagcgaatctgatgcgcttaaaaagcgacctg

SEQ ID NO: 3218 - DNA, 45 bp, synthetic construct
  source 1..45: mol_type = other DNA
ggcgcgagccgcgttcgtgatctgttcgagaccgcgaagaaacag

SEQ ID NO: 3219 - DNA, 45 bp, synthetic construct
  source 1..45: mol_type = other DNA
gcggaaagcatcgttcgtgaatttgttcaagaagcggttcgtaaa

SEQ ID NO: 3220 - DNA, 45 bp, synthetic construct
  source 1..45: mol_type = other DNA
agccagaatcgcggtcgtgaactggttgagaaaatgaaagacctg

SEQ ID NO: 3221 - DNA, 45 bp, synthetic construct
  source 1..45: mol_type = other DNA
cgtgcgcagcgcaagctggcgctgacgacgattattgagcatacc

SEQ ID NO: 3222 - DNA, 45 bp, synthetic construct
  source 1..45: mol_type = other DNA
ctggaagcgttagagagcaatctgaagaagctgggcgactggctg

SEQ ID NO: 3223 - DNA, 45 bp, synthetic construct
  source 1..45: mol_type = other DNA
tttcgtgatttagccctgcgtgtggaccaaattcgtgacaatatg

SEQ ID NO: 3224 - DNA, 45 bp, synthetic construct
  source 1..45: mol_type = other DNA
accgatgaaaaggagcgtattctgaagacggtgattgacctggtg

SEQ ID NO: 3225 - DNA, 45 bp, synthetic construct
  source 1..45: mol_type = other DNA
ccgaaagaacgcacggaatggattaaagccatccagatggcgagc

SEQ ID NO: 3226 - DNA, 45 bp, synthetic construct
  source 1..45: mol_type = other DNA
gaagcgaccttacaagcgatggatgaaaagttacgtaaatggaaa

SEQ ID NO: 3227 - DNA, 45 bp, synthetic construct
  source 1..45: mol_type = other DNA
ctggaaaccgttgccgaactgattgcctctaaaaccttagaaaaa

SEQ ID NO: 3228 - DNA, 45 bp, synthetic construct
  source 1..45: mol_type = other DNA
attcatgaaggtttaaaactggcgaacgagcagattcaaaaagcg

SEQ ID NO: 3229 - DNA, 45 bp, synthetic construct
  source 1..45: mol_type = other DNA
ccggcgcaggccgacctggaatttttagagaatgcgaagaaactg

SEQ ID NO: 3230 - DNA, 45 bp, synthetic construct
  source 1..45: mol_type = other DNA
gtggaactgcgcgacgaactggcggcctacattaccaagcagacc

SEQ ID NO: 3231 - DNA, 45 bp, synthetic construct
  source 1..45: mol_type = other DNA
accaataatcgcatggagctgaaagcggccatcgaaggcttaaaa

SEQ ID NO: 3232 - DNA, 45 bp, synthetic construct
  source 1..45: mol_type = other DNA
gataaagcgatcgacaataccgtgcgccgcgcgaatacgattacc

SEQ ID NO: 3233 - DNA, 45 bp, synthetic construct
  source 1..45: mol_type = other DNA
gaaaaagatcgcaacgatctgattacgtacatgaccaaagccgcg

SEQ ID NO: 3234 - DNA, 45 bp, synthetic construct
  source 1..45: mol_type = other DNA
gaagcgaccgttaagacccatctggttcacatttattctaaactg

SEQ ID NO: 3235 - DNA, 45 bp, synthetic construct
  source 1..45: mol_type = other DNA
agccgtgaaatgcgcttagtggcgagctacttaaaagaagcccag

SEQ ID NO: 3236 - DNA, 45 bp, synthetic construct
  source 1..45: mol_type = other DNA
gcgcaggaattagacattaaagcgcgcaactttctgatcaataaa

SEQ ID NO: 3237 - DNA, 45 bp, synthetic construct
  source 1..45: mol_type = other DNA
gaacgtaaagacttcattaaaaccacggttaaagaattaattagc

SEQ ID NO: 3238 - DNA, 45 bp, synthetic construct
  source 1..45: mol_type = other DNA
gaaggcgatttattcacccagctgcgcaagattgtgaagatggcg

SEQ ID NO: 3239 - DNA, 45 bp, synthetic construct
  source 1..45: mol_type = other DNA
aaaccgctgaacaactttgcggcggaggttggcaaaatccgtgat

SEQ ID NO: 3240 - DNA, 45 bp, synthetic construct
  source 1..45: mol_type = other DNA
aaagaatttatccgcaaaattgtgcaagccaaacagtctgcggat

SEQ ID NO: 3241 - DNA, 45 bp, synthetic construct
  source 1..45: mol_type = other DNA
cgtaaagaattagagacctttattaagaacggcattgacagcacc

SEQ ID NO: 3242 - DNA, 45 bp, synthetic construct
  source 1..45: mol_type = other DNA
ctgcgtacccgcatgggtcataccatggcgttagagcgtctggcg

SEQ ID NO: 3243 - DNA, 45 bp, synthetic construct
  source 1..45: mol_type = other DNA
accgaaaaagttgtttttcaggaaacgaaggcgattgccgataat

SEQ ID NO: 3244 - DNA, 45 bp, synthetic construct
  source 1..45: mol_type = other DNA
attgtgcaggccttagaagaaaccttccgcattggccgcgaactg

SEQ ID NO: 3245 - DNA, 45 bp, synthetic construct
  source 1..45: mol_type = other DNA
agcaatgtggttcgcgaactgattgagcgcgtgagcgacaaactg

SEQ ID NO: 3246 - DNA, 45 bp, synthetic construct
  source 1..45: mol_type = other DNA
agcagcgatgttgttagctatgtgcgcgaccagctgcgcaaacat

SEQ ID NO: 3247 - DNA, 45 bp, synthetic construct
  source 1..45: mol_type = other DNA
ccgctggtgacgaaggtgcatatggaagttgcccgtgcgtctcgt

SEQ ID NO: 3248 - DNA, 45 bp, synthetic construct
  source 1..45: mol_type = other DNA
ctgagcgtgatgaaggagacctatgaaacggttatgaaaaaaggc

SEQ ID NO: 3249 - DNA, 45 bp, synthetic construct
  source 1..45: mol_type = other DNA
cgtgataaattaaacatgcagctgcagcgcatcattgatgaggcg

SEQ ID NO: 3250 - DNA, 45 bp, synthetic construct
  source 1..45: mol_type = other DNA
gtgcaggcgacggaccgtctgatgaaagagttacgtgatatctat

SEQ ID NO: 3251 - DNA, 45 bp, synthetic construct
  source 1..45: mol_type = other DNA
cgtgatgaagttgttaatacccgtttctctgcgctgttaaaagaa

SEQ ID NO: 3252 - DNA, 45 bp, synthetic construct
  source 1..45: mol_type = other DNA
gaagaaggctctgcctataatgaaaagttaattccgatcagccgt

SEQ ID NO: 3253 - DNA, 45 bp, synthetic construct
  source 1..45: mol_type = other DNA
tggaccaaagcctctcagcagattaaccaacatgtgaaggataaa

SEQ ID NO: 3254 - DNA, 45 bp, synthetic construct
  source 1..45: mol_type = other DNA
gatgaagtgaagatcaaagtgctgcaacgcctgagcatcgcgagc

SEQ ID NO: 3255 - DNA, 45 bp, synthetic construct
  source 1..45: mol_type = other DNA
cgtgcggaagccgaggcggaagtgcaacgcagcgtggagcgtttt

SEQ ID NO: 3256 - DNA, 45 bp, synthetic construct
  source 1..45: mol_type = other DNA
gcggaagtgcgccaagcgaccgcggaggccgaacgtgccgtggcg

SEQ ID NO: 3257 - DNA, 45 bp, synthetic construct
  source 1..45: mol_type = other DNA
aaagaagtggccaagaaaatggtggaatacatcattgtgaacagc

SEQ ID NO: 3258 - DNA, 45 bp, synthetic construct
  source 1..45: mol_type = other DNA
gcggcgcagaagacgctggcggaagaggttaccaaattagtgcat

SEQ ID NO: 3259 - DNA, 45 bp, synthetic construct
  source 1..45: mol_type = other DNA
ctggatgaattaaacaaagcgctgcgcttagaagcgttaacccgt

SEQ ID NO: 3260 - DNA, 45 bp, synthetic construct
  source 1..45: mol_type = other DNA
gtggaacaggacttaaaacatgtggttacgattaaacgcgaactg

SEQ ID NO: 3261 - DNA, 45 bp, synthetic construct
  source 1..45: mol_type = other DNA
gaaaataccgagaagctgctgaaaatcttacgtgataacgtgagc

SEQ ID NO: 3262 - DNA, 45 bp, synthetic construct
  source 1..45: mol_type = other DNA
aaactggtgacgaagattattgcgcacgagctggcgcaccagtgg

SEQ ID NO: 3263 - DNA, 45 bp, synthetic construct
  source 1..45: mol_type = other DNA
ggcgaagatgcccgcgcggcgctgacgacgctgagcgagcgtgtg

SEQ ID NO: 3264 - DNA, 45 bp, synthetic construct
  source 1..45: mol_type = other DNA
gcgacctatgagatcgatcgtgtgttatctcagctgttaaaagaa

SEQ ID NO: 3265 - DNA, 45 bp, synthetic construct
  source 1..45: mol_type = other DNA
aatgaatatttaaacctggtgggccgcttacgtaaaatcattgat

SEQ ID NO: 3266 - DNA, 45 bp, synthetic construct
  source 1..45: mol_type = other DNA
ccgcgtgaattaaagaccgatctgacggcctttgtggagcaggtg

SEQ ID NO: 3267 - DNA, 45 bp, synthetic construct
  source 1..45: mol_type = other DNA
gcggaaagcgttacggcggtgaaagaggccgaaaaagccattcgt

SEQ ID NO: 3268 - DNA, 45 bp, synthetic construct
  source 1..45: mol_type = other DNA
agcattcagcgccgcattaaaaaagttacgcatgatatggacatg

SEQ ID NO: 3269 - DNA, 45 bp, synthetic construct
  source 1..45: mol_type = other DNA
gcggcgattacgcacaccgcgcgtatggccgacaaactgcgcctg

SEQ ID NO: 3270 - DNA, 45 bp, synthetic construct
  source 1..45: mol_type = other DNA
accaaacatttacacaatgatgtggagaaggaacgtaaggaaaaa

SEQ ID NO: 3271 - DNA, 45 bp, synthetic construct
  source 1..45: mol_type = other DNA
gcgctgagcaagtctatggcggaaattatccgcgcggatatgcgt

SEQ ID NO: 3272 - DNA, 45 bp, synthetic construct
  source 1..45: mol_type = other DNA
gcgctggaattcttactgaaagcgcaccaaaccgcggttgataaa

SEQ ID NO: 3273 - DNA, 45 bp, synthetic construct
  source 1..45: mol_type = other DNA
gcggatgcggttttcgcggaagtgcaccgcgcgaatttaagcaaa

SEQ ID NO: 3274 - DNA, 45 bp, synthetic construct
  source 1..45: mol_type = other DNA
gaacgtgaattagagcagctgagccgcggttgggtgcgtggtctg

SEQ ID NO: 3275 - DNA, 45 bp, synthetic construct
  source 1..45: mol_type = other DNA
accggcgatcgcttaaattttggcttagccgcggaaaaggcgcgt

SEQ ID NO: 3276 - DNA, 45 bp, synthetic construct
  source 1..45: mol_type = other DNA
ccggattttttaaagaaaagcgtggacgagagcctgaagcgtctg

SEQ ID NO: 3277 - DNA, 45 bp, synthetic construct
  source 1..45: mol_type = other DNA
cattggaatcgcttaaatagcgatgcctctaatctgaagagcaaa

SEQ ID NO: 3278 - DNA, 45 bp, synthetic construct
  source 1..45: mol_type = other DNA
gatattcagatggttgagagcattaaacgctacctggaacgcaaa

SEQ ID NO: 3279 - DNA, 45 bp, synthetic construct
  source 1..45: mol_type = other DNA
gatgaagcgcgcatcaatcagctgttcttaaccgcgttagataaa

SEQ ID NO: 3280 - DNA, 45 bp, synthetic construct
  source 1..45: mol_type = other DNA
gcggcgaccttagaggaaaaactgaacaagatttttgagaaactg

SEQ ID NO: 3281 - DNA, 45 bp, synthetic construct
  source 1..45: mol_type = other DNA
gcggcggatgttgaggtgagcctgcgcgccagcctgcaccgtctg

SEQ ID NO: 3282 - DNA, 45 bp, synthetic construct
  source 1..45: mol_type = other DNA
cgtaaactgttaaaggaagcgtttcaaaagaccctgacggatctg

SEQ ID NO: 3283 - DNA, 45 bp, synthetic construct
  source 1..45: mol_type = other DNA
atggtgcaggccttaaatcgtgcgttagacgaagaaatggccaaa

SEQ ID NO: 3284 - DNA, 45 bp, synthetic construct
  source 1..45: mol_type = other DNA
cagtttgaaaagttaatggaaaatatgcgtaacgacattgcgagc

SEQ ID NO: 3285 - DNA, 45 bp, synthetic construct
  source 1..45: mol_type = other DNA
gaaagccaggccgagcgtgtgcgtgccgagctggcgcgctttctg

SEQ ID NO: 3286 - DNA, 45 bp, synthetic construct
  source 1..45: mol_type = other DNA
ggcctggtgaacaaggcgattcaggacatgatcagcaaacaccat

SEQ ID NO: 3287 - DNA, 45 bp, synthetic construct
  source 1..45: mol_type = other DNA
cgtgcgcaggagttaatgattgtgctggaggagtatattcgcacc

SEQ ID NO: 3288 - DNA, 45 bp, synthetic construct
  source 1..45: mol_type = other DNA
acccatagcttagcccgttttgcggttgaccagcataacaccaaa

SEQ ID NO: 3289 - DNA, 45 bp, synthetic construct
  source 1..45: mol_type = other DNA
cgtaccagcaaggttcgtcagctgttagacaccaccgacattcag

SEQ ID NO: 3290 - DNA, 45 bp, synthetic construct
  source 1..45: mol_type = other DNA
gatctgctgaagcacaccaccaatgttgttaaagcgcacaccaat

SEQ ID NO: 3291 - DNA, 45 bp, synthetic construct
  source 1..45: mol_type = other DNA
gaagatgaagcccgcgcgattgtggccgcccgtctgaacaccctg

SEQ ID NO: 3292 - DNA, 45 bp, synthetic construct
  source 1..45: mol_type = other DNA
gtgtataaatctgccgaagcggtggacttagcgaccaaggaactg

SEQ ID NO: 3293 - DNA, 45 bp, synthetic construct
  source 1..45: mol_type = other DNA
ccgctgaaaacgttagaaaccctgcgcaaggaagtgggtgcgtat

SEQ ID NO: 3294 - DNA, 45 bp, synthetic construct
  source 1..45: mol_type = other DNA
catgaatatcacgccgaaaccattaagaacgtgcgtacggcgacc

SEQ ID NO: 3295 - DNA, 45 bp, synthetic construct
  source 1..45: mol_type = other DNA
ggcatgcgtacgtacctggatctgttacaacatgtgttagatcat

SEQ ID NO: 3296 - DNA, 45 bp, synthetic construct
  source 1..45: mol_type = other DNA
gaaaccatgcgtgagcgcaccctgtttgaccgcgcgcgtggtctg

SEQ ID NO: 3297 - DNA, 45 bp, synthetic construct
  source 1..45: mol_type = other DNA
gaaaaagcgcaacaagaatatcgtaagacgctggaaaagattatt

SEQ ID NO: 3298 - DNA, 45 bp, synthetic construct
  source 1..45: mol_type = other DNA
aatagcattaaggacaaatttgaacaagccctgattgaccgtgtg

SEQ ID NO: 3299 - DNA, 45 bp, synthetic construct
  source 1..45: mol_type = other DNA
gaaaaactgaagatcaaagcgcagtcttacctggatgccattcag

SEQ ID NO: 3300 - DNA, 45 bp, synthetic construct
  source 1..45: mol_type = other DNA
gtggaacgtttaaagcaggtgctgttacaccagcaggccaaattt

SEQ ID NO: 3301 - DNA, 45 bp, synthetic construct
  source 1..45: mol_type = other DNA
cgtgcgcgttacgttaccctggcggcccgcctggaacaagaaacc

SEQ ID NO: 3302 - DNA, 45 bp, synthetic construct
  source 1..45: mol_type = other DNA
cagatggaaaagttaaaaggcgcgttagacctgctggagcagttt

SEQ ID NO: 3303 - DNA, 45 bp, synthetic construct
  source 1..45: mol_type = other DNA
cgtaatgaagcccgcatgctggtggataaccgcctgcgtcaactg

SEQ ID NO: 3304 - DNA, 45 bp, synthetic construct
  source 1..45: mol_type = other DNA
attgaaaataaggccgcggattatttaaaggtgagcgccaaaaat

SEQ ID NO: 3305 - DNA, 45 bp, synthetic construct
  source 1..45: mol_type = other DNA
ctgaaagaaatcatcgatgaactgggtaagcaggcgaaggaacag

SEQ ID NO: 3306 - DNA, 45 bp, synthetic construct
  source 1..45: mol_type = other DNA
gatgcggatatcttaagctgggcgaatcgcaaggtgcgtacgatg

SEQ ID NO: 3307 - DNA, 45 bp, synthetic construct
  source 1..45: mol_type = other DNA
gaacgtaccttagacctggcgatgcagcgcttaaaagcgttcgtg

SEQ ID NO: 3308 - DNA, 45 bp, synthetic construct
  source 1..45: mol_type = other DNA
ggcgcggaatctgttctgcaggtgttccgcgaagcgaaggcggaa

SEQ ID NO: 3309 - DNA, 45 bp, synthetic construct
  source 1..45: mol_type = other DNA
cgtgaactggccacgcagatttatcacgagaccctgaagattacc

SEQ ID NO: 3310 - DNA, 45 bp, synthetic construct
  source 1..45: mol_type = other DNA
tttacccgtttaggtcagctggcggaggacattcagaaggaaatt

SEQ ID NO: 3311 - DNA, 45 bp, synthetic construct
  source 1..45: mol_type = other DNA
agcgatgatgttaagaaagcgattatcgagggcaccaaggcgtat

SEQ ID NO: 3312 - DNA, 45 bp, synthetic construct
  source 1..45: mol_type = other DNA
gaagcggtggaccaactggtgaaattcaaccgtgcgttagcggat

SEQ ID NO: 3313 - DNA, 45 bp, synthetic construct
  source 1..45: mol_type = other DNA
gaatatgtgcgcaagagcgtgggcaacgccctgcgtgacattagc

SEQ ID NO: 3314 - DNA, 45 bp, synthetic construct
  source 1..45: mol_type = other DNA
gcggataccttagagcgtgtgaccaagatcattgtggaccgtctg

SEQ ID NO: 3315 - DNA, 45 bp, synthetic construct
  source 1..45: mol_type = other DNA
gcgagccagtacatcggcgatctgatccacaaagatatcaaagaa

SEQ ID NO: 3316 - DNA, 45 bp, synthetic construct
  source 1..45: mol_type = other DNA
tatcgtcagcgcttaaccgatctgggtgccattgcgaaggcggaa

SEQ ID NO: 3317 - DNA, 45 bp, synthetic construct
  source 1..45: mol_type = other DNA
agcgatgatgttaagcgtgcgattgagaagggcaccaacgattat

SEQ ID NO: 3318 - DNA, 45 bp, synthetic construct
  source 1..45: mol_type = other DNA
ctgagccagttagagagcgtgatgaaagagttatatcgtgagagc

SEQ ID NO: 3319 - DNA, 45 bp, synthetic construct
  source 1..45: mol_type = other DNA
acccatgaaatccaacgtatgattggccgcgccatgcgtaccgcg

SEQ ID NO: 3320 - DNA, 45 bp, synthetic construct
  source 1..45: mol_type = other DNA
aataaagatgccttagatctgattcaagaggcgattaagaaagcg

SEQ ID NO: 3321 - DNA, 45 bp, synthetic construct
  source 1..45: mol_type = other DNA
atggatagcgttttcgcggaagcgatcgccaaagtgcgcaaacag

SEQ ID NO: 3322 - DNA, 48 bp, synthetic construct
  source 1..48: mol_type = other DNA
cagtatggcgagggtctggcgcgtgccgttcaggatggtctgaagaaa

SEQ ID NO: 3323 - DNA, 48 bp, synthetic construct
  source 1..48: mol_type = other DNA
agcgcggatcgcgccagcctgattgacgacgcgtttgccctggcccgt

SEQ ID NO: 3324 - DNA, 48 bp, synthetic construct
  source 1..48: mol_type = other DNA
ccggatagcaagacgaaactggcgttagacattattaagggcttagaa

SEQ ID NO: 3325 - DNA, 48 bp, synthetic construct
  source 1..48: mol_type = other DNA
ccgaaaaccgttgccgaaatgattgatgccttcagccgtgcccgtgat

SEQ ID NO: 3326 - DNA, 48 bp, synthetic construct; identical to SEQ ID NO: 1361
  source 1..48: mol_type = other DNA

SEQ ID NO: 3327 - DNA, 48 bp, synthetic construct
  source 1..48: mol_type = other DNA
cgtaaagcggttgcccatattaattctgtttggaaagatttactggaa

SEQ ID NO: 3328 - DNA, 48 bp, synthetic construct
  source 1..48: mol_type = other DNA
ccggaaacctacggtcgtctgagcgttttactgaaacgcgcggccgaa

SEQ ID NO: 3329 - DNA, 48 bp, synthetic construct
  source 1..48: mol_type = other DNA
cgtgaagcgatcgccgcgagcattcacgacgtggtgaaggaagttcag

SEQ ID NO: 3330 - DNA, 48 bp, synthetic construct
  source 1..48: mol_type = other DNA
ctggcggatgcccaatatctgcatgagttactgacccgcaaaaacatt

SEQ ID NO: 3331 - DNA, 48 bp, synthetic construct
  source 1..48: mol_type = other DNA
aaacaggcgttaatcgatagcgtgtacgcccgtgaaacgaatcgcatt

SEQ ID NO: 3332 - DNA, 48 bp, synthetic construct
  source 1..48: mol_type = other DNA
ccgtataccttagacgtgattcgtaaggacctgaaaaagcagttactg

SEQ ID NO: 3333 - DNA, 48 bp, synthetic construct
  source 1..48: mol_type = other DNA
gaaaaagaacgcttatttaataatttagcccatctgggtaatatcctg

SEQ ID NO: 3334 - DNA, 48 bp, synthetic construct
  source 1..48: mol_type = other DNA
gaaggcgcgcaacaacgtatggcgcaggaggttctgacccacctgaaa

SEQ ID NO: 3335 - DNA, 48 bp, synthetic construct
  source 1..48: mol_type = other DNA
aaacaggaattagacgcggcgctgaagaaggcgaaagagctggccagc

SEQ ID NO: 3336 - DNA, 48 bp, synthetic construct
  source 1..48: mol_type = other DNA
cgtgaagcgatcgagggctggaaaaaaatcacggatggcgttcatagc

SEQ ID NO: 3337 - DNA, 48 bp, synthetic construct
  source 1..48: mol_type = other DNA
agcgtgctggacgaggcggtgcgtgttcgcctgagccgcaatgttgat

SEQ ID NO: 3338 - DNA, 48 bp, synthetic construct
  source 1..48: mol_type = other DNA
ccgaaagaaatgaaggagtttctggatgagcaccagaaaatgacgagc

SEQ ID NO: 3339 - DNA, 48 bp, synthetic construct
  source 1..48: mol_type = other DNA
gatgaacaggttcgcggctggaataatgttacgaaagcggttcatgcg

SEQ ID NO: 3340 - DNA, 48 bp, synthetic construct
  source 1..48: mol_type = other DNA
aaacaggaaatggttgacattattgaaacggtttatcgtggtgcgcgt

SEQ ID NO: 3341 - DNA, 48 bp, synthetic construct
  source 1..48: mol_type = other DNA
gcggaacgtttacgcgataaaattttagccagcgaagccagcttcgcg

SEQ ID NO: 3342 - DNA, 48 bp, synthetic construct
  source 1..48: mol_type = other DNA
gcgcaggcgaaggccgatgtgctggaccaaattaaattagcgttagat

SEQ ID NO: 3343 - DNA, 48 bp, synthetic construct
  source 1..48: mol_type = other DNA
ccggcggatatcgttaaaaatctgaaggacaatatgaccatcctggaa

SEQ ID NO: 3344 - DNA, 48 bp, synthetic construct
  source 1..48: mol_type = other DNA
ctgcaggaattagacattaaaattcgcaagattctgtctgataagtat

SEQ ID NO: 3345 - DNA, 48 bp, synthetic construct
  source 1..48: mol_type = other DNA
ccgagcctggttaagaaaattaataacatccgtgaagcccgttacgaa

SEQ ID NO: 3346 - DNA, 48 bp, synthetic construct
  source 1..48: mol_type = other DNA
ggcgaactggccaagcatgcggtgtctgagggcacccgcgcggttacc

SEQ ID NO: 3347 - DNA, 48 bp, synthetic construct
  source 1..48: mol_type = other DNA
gaagatctgaagcaactgaaaagcgccttatataccttactggagacc

SEQ ID NO: 3348 - DNA, 48 bp, synthetic construct
  source 1..48: mol_type = other DNA
gaaagcgaaaaggttaatgaaattgttaaggcggtgaagaccgccctg

SEQ ID NO: 3349 - DNA, 48 bp, synthetic construct
  source 1..48: mol_type = other DNA
gtggaagaagccgttcgtattgtgaaggaggtgaccgagaaattaagc

SEQ ID NO: 3350 - DNA, 48 bp, synthetic construct
  source 1..48: mol_type = other DNA
gcggcggaaaacaagctgaatgattctttaattcaggagctgaagaaa

SEQ ID NO: 3351 - DNA, 48 bp, synthetic construct
  source 1..48: mol_type = other DNA
gcgggcaccttagactggattaaagaatcttctgcgctggccaaaaaa

SEQ ID NO: 3352 - DNA, 48 bp, synthetic construct
  source 1..48: mol_type = other DNA
tataaagatttagagggcaaagtgaagtctgtgctggagagcaaccgt

SEQ ID NO: 3353 - DNA, 48 bp, synthetic construct
  source 1..48: mol_type = other DNA
agcgatgtgaagcaagaactgattaagtacggcaaaaagctggttgaa

SEQ ID NO: 3354 - DNA, 48 bp, synthetic construct
  source 1..48: mol_type = other DNA
gaaaatctggttcgcgaacagattgttcgcgtgctgttagaacgcgtg

SEQ ID NO: 3355 - DNA, 48 bp, synthetic construct
  source 1..48: mol_type = other DNA
aaaaccagccacgaggaactggcgaagaagctgacccaagtggagaaa

SEQ ID NO: 3356 - DNA, 48 bp, synthetic construct
  source 1..48: mol_type = other DNA
cataaagaagttacgaccattgtggaggccattaaagccctggccaat

SEQ ID NO: 3357 - DNA, 48 bp, synthetic construct
  source 1..48: mol_type = other DNA
aatcaggcgaaggagctggaacgtttaatcgataaagccatgaaaaaa

SEQ ID NO: 3358 - DNA, 48 bp, synthetic construct
  source 1..48: mol_type = other DNA
aaactgaccgagaaggcgattggcgacgtttttagcttactggagaaa

SEQ ID NO: 3359 - DNA, 48 bp, synthetic construct
  source 1..48: mol_type = other DNA
aaagaaagcgttgaggcgatgattattgccggtaaaagcgccaatgaa

SEQ ID NO: 3360 - DNA, 48 bp, synthetic construct
  source 1..48: mol_type = other DNA
gcgaaagaattaatcgaaaaaagcgttgccctgagcaaggcggttaaa

SEQ ID NO: 3361 - DNA, 48 bp, synthetic construct
  source 1..48: mol_type = other DNA
gcgaaaattaagacgattggcattgaggcccgtaaagacatgcaggaa

SEQ ID NO: 3362 - DNA, 48 bp, synthetic construct
  source 1..48: mol_type = other DNA
aatgaagtgatcgacaaaatgcgtgcggttcaagaacaggttgcgagc

SEQ ID NO: 3363 - DNA, 48 bp, synthetic construct
  source 1..48: mol_type = other DNA
accgaaaaatctaaggaactggcggagatcgtggtgcaagcgttcctg

SEQ ID NO: 3364 - DNA, 48 bp, synthetic construct
  source 1..48: mol_type = other DNA
ggcccggtgaaggagaaaattctgtctgttattaaagagtggggcacc

SEQ ID NO: 3365 - DNA, 48 bp, synthetic construct
  source 1..48: mol_type = other DNA
gtggcgaaagactctgaagcgattatcaagaatgtgatcgataagtat

SEQ ID NO: 3366 - DNA, 48 bp, synthetic construct
  source 1..48: mol_type = other DNA
gaagtgtatcaaatcctggaaaaaggtgccgcgaaacgcaccacggcg

SEQ ID NO: 3367 - DNA, 48 bp, synthetic construct
  source 1..48: mol_type = other DNA
caggaacatcgcgttatgctggtgaattctatgaacaccgtgaaggaa

SEQ ID NO: 3368 - DNA, 48 bp, synthetic construct
  source 1..48: mol_type = other DNA
ggcgaaagcgagcgcgcggtgcgtcaagtttttcagcgcgcgaagaat

SEQ ID NO: 3369 - DNA, 48 bp, synthetic construct
  source 1..48: mol_type = other DNA
cagaataccttagaccataccagcgagcgcattgcgcgcattcgcgtg

SEQ ID NO: 3370 - DNA, 48 bp, synthetic construct
  source 1..48: mol_type = other DNA
ccgctgggctctaagattgcgagcgcccgcgaagtgatcaaacgcgat

SEQ ID NO: 3371 - DNA, 48 bp, synthetic construct
  source 1..48: mol_type = other DNA
aaagtggaaatccaagtgctggaagacatctataattctctgaacaaa

SEQ ID NO: 3372 - DNA, 48 bp, synthetic construct
  source 1..48: mol_type = other DNA
cagaaacgtgagtctattgtgcaggccgccattgcggagtttggtgat

SEQ ID NO: 3373 - DNA, 48 bp, synthetic construct
  source 1..48: mol_type = other DNA
ctggatgtggccgccgaaaaaattgaccgctttatgcaggccgtgacc

SEQ ID NO: 3374 - DNA, 48 bp, synthetic construct
  source 1..48: mol_type = other DNA
accggcgatcgcttaaattttggcttagccgcggaaaaggcgcgccgt

SEQ ID NO: 3375 - DNA, 48 bp, synthetic construct
  source 1..48: mol_type = other DNA
aaaccgaaaaacttagatgcgagcatcacgagcattatccatgagatt

SEQ ID NO: 3376 - DNA, 48 bp, synthetic construct
  source 1..48: mol_type = other DNA
gaagattttaaggttgatgcgcagcgcgacattatgcagcgcaccggc

SEQ ID NO: 3377 - DNA, 48 bp, synthetic construct
  source 1..48: mol_type = other DNA
gtggatgtggccgagagcctggcgatcgagcgtgcgaagagcttattt

SEQ ID NO: 3378 - DNA, 48 bp, synthetic construct
  source 1..48: mol_type = other DNA
catgaaaccgccttacgtgtgaccgccgagcgtgcgatgaacacccgt

SEQ ID NO: 3379 - DNA, 48 bp, synthetic construct
  source 1..48: mol_type = other DNA
cagaccaccaaggaggtgctggaagccaaggtgaaaggtctgatccgt

SEQ ID NO: 3380 - DNA, 48 bp, synthetic construct
  source 1..48: mol_type = other DNA
ctggatgaaatcttaaaagcgtttaaggaggcgcattctaccgttctg

SEQ ID NO: 3381 - DNA, 48 bp, synthetic construct
  source 1..48: mol_type = other DNA
agcagcgcgttagaccaggcggcgcaattacgtacccgcctggagaaa

SEQ ID NO: 3382 - DNA, 48 bp, synthetic construct
  source 1..48: mol_type = other DNA
ccgaaaaccgccttaaaaattgtggacacgattcgtaaggatatcctg

SEQ ID NO: 3383 - DNA, 48 bp, synthetic construct
  source 1..48: mol_type = other DNA
gtgcgtacctggttaaaggatgcgaaacaagttctgccggaggcgctg

SEQ ID NO: 3384 - DNA, 48 bp, synthetic construct
  source 1..48: mol_type = other DNA
attgatgaagttcgcaatgcgctgatccgcggcttttctgaaacgctg

SEQ ID NO: 3385 - DNA, 48 bp, synthetic construct
  source 1..48: mol_type = other DNA
ctgagcgaacgcgttcgtgaaagcttaaaggtgtggaaaaacgcggaa

SEQ ID NO: 3386 - DNA, 48 bp, synthetic construct
  source 1..48: mol_type = other DNA
cgtgatgatttaaacctggtgctggccacggcggcgaagctgaaggcg

SEQ ID NO: 3387 - DNA, 48 bp, synthetic construct
  source 1..48: mol_type = other DNA
aaaaatgtgcgcgacctggcgattaagttacgtgatgccaaacaagat

SEQ ID NO: 3388 - DNA, 48 bp, synthetic construct
  source 1..48: mol_type = other DNA
ctgcatgaagttcgcaatgcggtggagaacgcgaatcgcgtgttaagc

SEQ ID NO: 3389 - DNA, 48 bp, synthetic construct
  source 1..48: mol_type = other DNA
aaaaccattcaagaggtgattgaagccttaaaaccgttatttgagaaa

SEQ ID NO: 3390 - DNA, 48 bp, synthetic construct
  source 1..48: mol_type = other DNA
gaaagccagtacaaggaaatggaagcgaaggttagcagcacgctgagc

SEQ ID NO: 3391 - DNA, 48 bp, synthetic construct
  source 1..48: mol_type = other DNA
gcggatcgtttaaaggcgtggaccgaagccttaattcgtgacgtgaat

SEQ ID NO: 3392 - DNA, 48 bp, synthetic construct
  source 1..48: mol_type = other DNA
aaagaagaagccttagaactgattaacggttatattcaaaaaatcaaa

SEQ ID NO: 3393 - DNA, 48 bp, synthetic construct
  source 1..48: mol_type = other DNA
aaatttgaaaacatgggtgcgcagatggtgcgcgaggtggcgtctcgt

SEQ ID NO: 3394 - DNA, 48 bp, synthetic construct
  source 1..48: mol_type = other DNA
agcatgagcgttgaggcggcgaaaaacgcccgtgaattactgttaaaa

SEQ ID NO: 3395 - DNA, 48 bp, synthetic construct
  source 1..48: mol_type = other DNA
cgtgcggaagccgaggcggaagtgcaacgcagcgtggagcgtttcaaa

SEQ ID NO: 3396 - DNA, 48 bp, synthetic construct
  source 1..48: mol_type = other DNA
gcggatgatacgttagcgctggcgcgcgcccgtggcgaggcgatgagc

SEQ ID NO: 3397 - DNA, 48 bp, synthetic construct
  source 1..48: mol_type = other DNA
ccggatgaattagcccgtcgtgcggcccaagtgattgccgatcgcacc

SEQ ID NO: 3398 - DNA, 48 bp, synthetic construct
  source 1..48: mol_type = other DNA
ggccgtgcggttaaccatattaaatctgtttggaaagatttactggaa

SEQ ID NO: 3399 - DNA, 48 bp, synthetic construct
  source 1..48: mol_type = other DNA
attaccaaattacgcaccgatctgcgcttcattgcggagctgacgatt

SEQ ID NO: 3400 - DNA, 48 bp, synthetic construct
  source 1..48: mol_type = other DNA
gaagtgcgtaacatcgtggataaaacggccagctttgttgcgcgcaat

SEQ ID NO: 3401 - DNA, 48 bp, synthetic construct
  source 1..48: mol_type = other DNA
gtggaactgatccacaaagcgtttatcaagggcattaagaatgccacc

SEQ ID NO: 3402 - DNA, 48 bp, synthetic construct
  source 1..48: mol_type = other DNA
cgtgaaaaagccttagaactggcgatggcccaaattgataagaatttt

SEQ ID NO: 3403 - DNA, 48 bp, synthetic construct
  source 1..48: mol_type = other DNA
ctggtggatcaagagatgaataatgtgtacgagcgtgtgatgaagctg

SEQ ID NO: 3404 - DNA, 48 bp, synthetic construct
  source 1..48: mol_type = other DNA
aatagcattaaggacaaatttgaacaagccctgattgaccgtgttaaa

SEQ ID NO: 3405 - DNA, 48 bp, synthetic construct
  source 1..48: mol_type = other DNA
cgtcagcatcaagagaaagtgattggttacattaattctgcggagcag

SEQ ID NO: 3406 - DNA, 48 bp, synthetic construct
  source 1..48: mol_type = other DNA
gaaaaaaatttagcctatgcgcgtaaggttaaagcggccctggagacc

SEQ ID NO: 3407 - DNA, 48 bp, synthetic construct
  source 1..48: mol_type = other DNA
aaagaactgtacgagcatgtgaaacaattaattgcgttacgtaagcag

SEQ ID NO: 3408 - DNA, 48 bp, synthetic construct
  source 1..48: mol_type = other DNA
cgtcatcagatgacggacctgctgagcatggacgccctgtatcgccag

SEQ ID NO: 3409 - DNA, 48 bp, synthetic construct
  source 1..48: mol_type = other DNA
gtggtggatatggagcaaattatgaccgaaaagttagcgcgtcaagtg

SEQ ID NO: 3410 - DNA, 48 bp, synthetic construct
  source 1..48: mol_type = other DNA
gcgtttattcgcgccagccgtgcgttaacggataaagttaccgacctg

SEQ ID NO: 3411 - DNA, 48 bp, synthetic construct
  source 1..48: mol_type = other DNA
atgcgtaaagttaagagcgtggtgttattccatcattctgaattactg

SEQ ID NO: 3412 - DNA, 48 bp, synthetic construct
  source 1..48: mol_type = other DNA
ccgaaagcggttgagattaccagctacatccgtaaagttctggaggaa

SEQ ID NO: 3413 - DNA, 48 bp, synthetic construct
  source 1..48: mol_type = other DNA
ctggcggaaaacgccgataaactgggtatcattctgcgcaatgagctg

SEQ ID NO: 3414 - DNA, 48 bp, synthetic construct
  source 1..48: mol_type = other DNA
ggcgaagcggttttagatcatgcgttaacgctgaaaaagggcgagaat

SEQ ID NO: 3415 - DNA, 48 bp, synthetic construct
  source 1..48: mol_type = other DNA
ctgggcgatgttttagaacgtgaagcctctgcgcagcaacgtttaggc

SEQ ID NO: 3416 - DNA, 48 bp, synthetic construct
  source 1..48: mol_type = other DNA
gtggaaagcatgaacaaggaactgaaaaagatcattggccaagtgcgt

SEQ ID NO: 3417 - DNA, 48 bp, synthetic construct
  source 1..48: mol_type = other DNA
gcggaagaacgcaaggcgaccattttagccagcctggcccgttacctg

SEQ ID NO: 3418 - DNA, 48 bp, synthetic construct
  source 1..48: mol_type = other DNA
accgatctgatgaacttcctgaaaaccgttcgcagcaccacggaaaaa

SEQ ID NO: 3419 - DNA, 48 bp, synthetic construct
  source 1..48: mol_type = other DNA
acccgtgattctggtctggtgattaagacgctggtggacctgttccgt

SEQ ID NO: 3420 - DNA, 48 bp, synthetic construct
  source 1..48: mol_type = other DNA
ctggaagatttagttcgtctggtggaggccaaaatttctcgtacgctg

SEQ ID NO: 3421 - DNA, 48 bp, synthetic construct
  source 1..48: mol_type = other DNA
caggtgcatgttatccgtgaagtggcctctatggcgaaagagaaactg

SEQ ID NO: 3422 - DNA, 48 bp, synthetic construct
  source 1..48: mol_type = other DNA
aaaaccaatttaatggccgaactggaaaagatgaacaaaattatccag

SEQ ID NO: 3423 - DNA, 48 bp, synthetic construct
  source 1..48: mol_type = other DNA
ctgaataaagccgttcgtgaaaccgcccacgaaaccatcagcgccatt

SEQ ID NO: 3424 - DNA, 48 bp, synthetic construct
  source 1..48: mol_type = other DNA
accaatcattctatcgtgcgtgaatacatcgtgcagtctctgcgcgat

SEQ ID NO: 3425 - DNA, 48 bp, synthetic construct
  source 1..48: mol_type = other DNA
cgtgaacgtttcttaaatgcgcgtgacacgctgcgtgccctgttagat

SEQ ID NO: 3426 - DNA, 48 bp, synthetic construct
  source 1..48: mol_type = other DNA
cgtaccctggagacgagcgtgaaagacgccctggcgcgcgcgaacgcg

SEQ ID NO: 3427 - DNA, 48 bp, synthetic construct
  source 1..48: mol_type = other DNA
gatcagcaggcccgcctgaaactggaggagattgcggccgatatcaaa

SEQ ID NO: 3428 - DNA, 48 bp, synthetic construct
  source 1..48: mol_type = other DNA
gaaccgtgggcgcaacgcgtggaagcggccgttcagcgtgttctggat

SEQ ID NO: 3429 - DNA, 48 bp, synthetic construct
  source 1..48: mol_type = other DNA
gatgaaaaacaaaaggtggcggtggaggttattaaaaacctgttaacc

SEQ ID NO: 3430 - DNA, 48 bp, synthetic construct
  source 1..48: mol_type = other DNA
gtgggcgaattaaacacccgtctgacggacgatgtgtctaaaatcaat

SEQ ID NO: 3431 - DNA, 48 bp, synthetic construct
  source 1..48: mol_type = other DNA
gataccgaaaagcgcgattttgtgcgcacggtgctgatcctgaaggaa

SEQ ID NO: 3432 - DNA, 48 bp, synthetic construct
  source 1..48: mol_type = other DNA
gaacgtaatttagacctgaaaagcacgatcaaaaccatcattacgagc

SEQ ID NO: 3433 - DNA, 48 bp, synthetic construct
  source 1..48: mol_type = other DNA
atggcgaaattaaaccaggaactggagggtaaagtggccgattctctg

SEQ ID NO: 3434 - DNA, 48 bp, synthetic construct
  source 1..48: mol_type = other DNA
gatgtggtgaagaacgatgcgcgtgccacggcgagcgcctatttagaa

SEQ ID NO: 3435 - DNA, 48 bp, synthetic construct; identical to SEQ ID NO: 1323
  source 1..48: mol_type = other DNA

SEQ ID NO: 3436 - DNA, 48 bp, synthetic construct
  source 1..48: mol_type = other DNA
attaccctggagcaagcgaaaaaattagagaaacgtttaaatgaggtg

SEQ ID NO: 3437 - DNA, 48 bp, synthetic construct
  source 1..48: mol_type = other DNA
ctgagcgaaatcatcgtggattttcacgacaaaattaagagcatcagc

SEQ ID NO: 3438 - DNA, 48 bp, synthetic construct
  source 1..48: mol_type = other DNA
cataaactggacgcccagctgacccaagttctggaacgcgcgcaaaat

SEQ ID NO: 3439 - DNA, 48 bp, synthetic construct
  source 1..48: mol_type = other DNA
agcgcggcgaacaaggatgcgattcgcaagcagatggatgccgcggcg

SEQ ID NO: 3440 - DNA, 48 bp, synthetic construct
  source 1..48: mol_type = other DNA
aaagaaagcgccatcaaagtgctggagaaggcgattaaggcgtaccag

SEQ ID NO: 3441 - DNA, 48 bp, synthetic construct
  source 1..48: mol_type = other DNA
gataaagcgttaaagaccatggtggaaggtttacgtcaggttgcgacc

SEQ ID NO: 3442 - DNA, 48 bp, synthetic construct
  source 1..48: mol_type = other DNA
cgtgaaggcaagacggatctgctgcgcatcgtggaaaagtggaaaacc

SEQ ID NO: 3443 - DNA, 48 bp, synthetic construct
  source 1..48: mol_type = other DNA
gtgaaagaaacggaccgtattgcggccatggttgatggcttacagaaa

SEQ ID NO: 3444 - DNA, 48 bp, synthetic construct
  source 1..48: mol_type = other DNA
agccgtgcggacgccgcggtgaccgacgacgcgcgtggtctgttagcg

SEQ ID NO: 3445 - DNA, 48 bp, synthetic construct
  source 1..48: mol_type = other DNA
ccgtatagcgttcgcgcgaaagatttagccgaaaaattaagcaacgaa

SEQ ID NO: 3446 - DNA, 48 bp, synthetic construct
  source 1..48: mol_type = other DNA
aaagaactggttgaccagtataaagccgcccaggaagccgcgcgcgtg

SEQ ID NO: 3447 - DNA, 48 bp, synthetic construct
  source 1..48: mol_type = other DNA
gaaagcgattggaagatcgcgcgtcagatcggtccgaccttaaaagaa

SEQ ID NO: 3448 - DNA, 48 bp, synthetic construct
  source 1..48: mol_type = other DNA
ctgaaactgaaggagattaatgtggttaacgaaattacgaaaatcctg

SEQ ID NO: 3449 - DNA, 48 bp, synthetic construct
  source 1..48: mol_type = other DNA
gatgaactgcgcgacaaagtgaatggtgccctgaaaacgctgcgcgaa

SEQ ID NO: 3450 - DNA, 48 bp, synthetic construct
  source 1..48: mol_type = other DNA
ccggcgtttatcgttgaagaaagcatcaaggcgcagcgcaaattactg

SEQ ID NO: 3451 - DNA, 48 bp, synthetic construct; identical to SEQ ID NO: 1349
  source 1..48: mol_type = other DNA

SEQ ID NO: 3452 - DNA, 48 bp, synthetic construct
  source 1..48: mol_type = other DNA
catgaatatcacgccgaaaccattaagaacgtgcgtacggcgacggaa

SEQ ID NO: 3453 - DNA, 48 bp, synthetic construct
  source 1..48: mol_type = other DNA
ggcaccgaagccaacgaagcggcgttaaagtttgcgcgcgcgcacacc

SEQ ID NO: 3454 - DNA, 48 bp, synthetic construct
  source 1..48: mol_type = other DNA
attagcaccttagactttgaaattcgccaccagctgacgaaaatccat

SEQ ID NO: 3455 - DNA, 48 bp, synthetic construct
  source 1..48: mol_type = other DNA
ccgaaatttcgcgaggcggtgaaagccgccagcgatgagctgtctaaa

SEQ ID NO: 3456 - DNA, 48 bp, synthetic construct
  source 1..48: mol_type = other DNA
gaaattagcaaggccgtggatgtgtacaacagcctgaaggatcgcctg

SEQ ID NO: 3457 - DNA, 48 bp, synthetic construct
  source 1..48: mol_type = other DNA
tttcgtcaggcccacaccgcgagcggtaaggcggtgcacctggccgaa

SEQ ID NO: 3458 - DNA, 48 bp, synthetic construct
  source 1..48: mol_type = other DNA
gcgagccagcgcgaggcggcggaacgcgccatgcgtcagcgcgatcgt

SEQ ID NO: 3459 - DNA, 48 bp, synthetic construct
  source 1..48: mol_type = other DNA
ccggatcagatcggtgcgaaaggcgttgagaccgcggacaaagttctg

SEQ ID NO: 3460 - DNA, 48 bp, synthetic construct
  source 1..48: mol_type = other DNA
agcgaaggcttagcccgtattgatgcctacctgaaaaacgaaatccag

SEQ ID NO: 3461 - DNA, 48 bp, synthetic construct
  source 1..48: mol_type = other DNA
aataccgtgaacgttcatattcatcgcatccgtgaaaagctggagaaa

SEQ ID NO: 3462 - DNA, 48 bp, synthetic construct
  source 1..48: mol_type = other DNA
ggccaggtgggtcgccagctgaaaatcatcggcgatgacattaaccgt

SEQ ID NO: 3463 - DNA, 48 bp, synthetic construct
  source 1..48: mol_type = other DNA
tgggatgtgatccgcgataaaaccaagacgaaaattgagagcttaaaa

SEQ ID NO: 3464 - DNA, 48 bp, synthetic construct
  source 1..48: mol_type = other DNA
aaaagccgtttaatcgatcgtgcgtctcaactgctggaggtgatccgt

SEQ ID NO: 3465 - DNA, 48 bp, synthetic construct
  source 1..48: mol_type = other DNA
ccgaccgcgaaggccgaactggtgaagttaattaaagccatgcaggaa

SEQ ID NO: 3466 - DNA, 48 bp, synthetic construct
  source 1..48: mol_type = other DNA
cgtgatgcgaacgagcgtgtggcggagttcattcgtaacaaaatccgt

SEQ ID NO: 3467 - DNA, 48 bp, synthetic construct
  source 1..48: mol_type = other DNA
cgtctgcatacggttatggaacgtctgatggacaagattagcttcagc

SEQ ID NO: 3468 - DNA, 48 bp, synthetic construct
  source 1..48: mol_type = other DNA
ccgtatagcaagcaacataccattacgttagcgcgtgagctggccaaa

SEQ ID NO: 3469 - DNA, 48 bp, synthetic construct
  source 1..48: mol_type = other DNA
aaactgagcttaaacgtggtgcgtaagttaattgaattactgaaggaa

SEQ ID NO: 3470 - DNA, 48 bp, synthetic construct
  source 1..48: mol_type = other DNA
ccgcaggatcgcgccgcgctgctggcccgcgtggatcaactggcccgt

SEQ ID NO: 3471 - DNA, 48 bp, synthetic construct
  source 1..48: mol_type = other DNA
ctggaaagcgccttagcgatgctggcggacgcccagcagcgcaaagat

SEQ ID NO: 3472 - DNA, 48 bp, synthetic construct
  source 1..48: mol_type = other DNA
aatgaagatttaaagaaactggaagcctctgcgattgagctggccaaa

SEQ ID NO: 3473 - DNA, 48 bp, synthetic construct
  source 1..48: mol_type = other DNA
atttttgcgttagcccaggaaattaacgagctggcggagaaagcccgt

SEQ ID NO: 3474 - DNA, 48 bp, synthetic construct
  source 1..48: mol_type = other DNA
gaacaggcggttttagcgcagcgtatcgttgataaaatctggcgtgat

SEQ ID NO: 3475 - DNA, 48 bp, synthetic construct
  source 1..48: mol_type = other DNA
ccgctgggccaagccctgcgtgcgatcggtgatgaattcgaaacgcgt

SEQ ID NO: 3476 - DNA, 48 bp, synthetic construct
  source 1..48: mol_type = other DNA
agcgaaaccgttgaccgtgcgtttggtcaaatgaaagcggccattcgt

SEQ ID NO: 3477 - DNA, 48 bp, synthetic construct
  source 1..48: mol_type = other DNA
tttcgtgatttagccctgcgtgtggaccaaattcgtgaccagatggcg

SEQ ID NO: 3478 - DNA, 48 bp, synthetic construct
  source 1..48: mol_type = other DNA
agcgcggtgcaaatcaaacgtgaattaaaccatctgttatatcaacgt

SEQ ID NO: 3479 - DNA, 48 bp, synthetic construct
  source 1..48: mol_type = other DNA
gcggaagtgaaggagaccctggcgttagccgaagcggccgcgaacaaa

SEQ ID NO: 3480 - DNA, 48 bp, synthetic construct
  source 1..48: mol_type = other DNA
aaaaaagatgacgaggtgtttcgtacggccgtgggcgacctgaaccag

SEQ ID NO: 3481 - DNA, 48 bp, synthetic construct
  source 1..48: mol_type = other DNA
gatgcggaagttaaccgtgcgaaagcccaactgaaagccgcgttactg

SEQ ID NO: 3482 - DNA, 48 bp, synthetic construct
  source 1..48: mol_type = other DNA
aaaagcgaacgcgaggatctgattaagtacctgaaacaagcgacgagc

SEQ ID NO: 3483 - DNA, 48 bp, synthetic construct
  source 1..48: mol_type = other DNA
ccgaaaggccaaatggccctgaaatttaaggagctggtggagcagcgt

SEQ ID NO: 3484 - DNA, 48 bp, synthetic construct
  source 1..48: mol_type = other DNA
ccggaacaggccttaaatgatgcggttaagattatgaaagagaaaatt

SEQ ID NO: 3485 - DNA, 48 bp, synthetic construct
  source 1..48: mol_type = other DNA
agcaaaaatgtttctgatatgattgataaggttcatgaagagatgaaa

SEQ ID NO: 3486 - DNA, 48 bp, synthetic construct
  source 1..48: mol_type = other DNA
gcggatgcggttttcgcggaagtgcaccgcgcgaatttaagcaaggcg

SEQ ID NO: 3487 - DNA, 48 bp, synthetic construct
  source 1..48: mol_type = other DNA
cagctgagcaagtctatggatgcggtggccgagagcatttacgaaaaa

SEQ ID NO: 3488 - DNA, 48 bp, synthetic construct
  source 1..48: mol_type = other DNA
tttgataccgccttaaataccgtgatcgacgcgattgacaaaatccgt

SEQ ID NO: 3489 - DNA, 48 bp, synthetic construct
  source 1..48: mol_type = other DNA
gaacagggcgttatgaaggcgtttgaagccgccctgaaagacaccgcg

SEQ ID NO: 3490 - DNA, 48 bp, synthetic construct
  source 1..48: mol_type = other DNA
ccggtggaagttgccgaacgtattcgcacggtggtggccgcggagacc

SEQ ID NO: 3491 - DNA, 48 bp, synthetic construct
  source 1..48: mol_type = other DNA
ggcgatgcgaagttagcggaagcgaaggccgcggcgcgccagaacctg

SEQ ID NO: 3492 - DNA, 48 bp, synthetic construct
  source 1..48: mol_type = other DNA
agcggcaaattcgttaatggcattttagaccgtattgccaaagagcat

SEQ ID NO: 3493 - DNA, 48 bp, synthetic construct
  source 1..48: mol_type = other DNA
cagcgtgcgttcgttaaaaatgtggacgccattgaacgcgcgaagggc

SEQ ID NO: 3494 - DNA, 48 bp, synthetic construct
  source 1..48: mol_type = other DNA
agccgtgtggagcaagtgctggcggacttaaaaaatttcagcaaggaa

SEQ ID NO: 3495 - DNA, 48 bp, synthetic construct
  source 1..48: mol_type = other DNA
aaaacccagatctacgcggtgaaagacaagattgaaacgctgttaatt

SEQ ID NO: 3496 - DNA, 48 bp, synthetic construct
  source 1..48: mol_type = other DNA
gatcgtcagaacaaggcgtataaagaggccatggaagcgttaaaagaa

SEQ ID NO: 3497 - DNA, 48 bp, synthetic construct
  source 1..48: mol_type = other DNA
aatgaagcggccgacctgattgaaaaggccattaatatggccattcgt

SEQ ID NO: 3498 - DNA, 48 bp, synthetic construct
  source 1..48: mol_type = other DNA
gtggcggcgcgctctgatctgctggttgaccagtggaaaaagaaagcg

SEQ ID NO: 3499 - DNA, 48 bp, synthetic construct
  source 1..48: mol_type = other DNA
gtgcgtgaagttttcgaaatggcgacccgcgccgcgctgcaagcgcgt

SEQ ID NO: 3500 - DNA, 48 bp, synthetic construct
  source 1..48: mol_type = other DNA
gaaaatgatttacaacgtgcgaccgacttagcgtatcgcatggtgagc

SEQ ID NO: 3501 - DNA, 48 bp, synthetic construct
  source 1..48: mol_type = other DNA
catgaaaaattaacgcaggcgcgtaaccaactgctggccgaagccgcg

SEQ ID NO: 3502 - DNA, 48 bp, synthetic construct
  source 1..48: mol_type = other DNA
ctgggccatcaagttgcgagcgattacttacgtattatggagcgtgcg

SEQ ID NO: 3503 - DNA, 48 bp, synthetic construct
  source 1..48: mol_type = other DNA
cgtgataaaatcttaagcgatgtgttagccaaattttctgcggccatt

SEQ ID NO: 3504 - DNA, 48 bp, synthetic construct
  source 1..48: mol_type = other DNA
gatattcatcaaatcattgatagcatccaagaaaccaagaaattaaaa

SEQ ID NO: 3505 - DNA, 48 bp, synthetic construct
  source 1..48: mol_type = other DNA
cgtgatattatcaacgcgcgtctgcgcgaggaactggacaaaatcacc

SEQ ID NO: 3506 - DNA, 48 bp, synthetic construct
  source 1..48: mol_type = other DNA
attggcaaaatcacgcgtaccgtgtctgactatgtgcaagaagcccgt

SEQ ID NO: 3507 - DNA, 48 bp, synthetic construct
  source 1..48: mol_type = other DNA
gaaaatgtgcacgcccgtattgaaggtttcaaaagcgccctggacgtg

SEQ ID NO: 3508 - DNA, 48 bp, synthetic construct
  source 1..48: mol_type = other DNA
aaacaggcggtttctatgtttctgggcgccgttgaagaagccaaaaaa

SEQ ID NO: 3509 - DNA, 48 bp, synthetic construct
  source 1..48: mol_type = other DNA
ccggatgaaatgcgcaaggaagtgctgatgcaattactgaatgttaaa

SEQ ID NO: 3510 - DNA, 48 bp, synthetic construct
  source 1..48: mol_type = other DNA
catcgtgaagccgttgaacattttttagaggcgctgaacatgcagcgt

SEQ ID NO: 3511 - DNA, 48 bp, synthetic construct
  source 1..48: mol_type = other DNA
cgtgtgccggagcaaaaactgggcgccgccattgatgagtttgccagc

SEQ ID NO: 3512 - DNA, 48 bp, synthetic construct
  source 1..48: mol_type = other DNA
ggcgatcaggccgaccgttatgcggttaagctgctgaaccatttacgt

SEQ ID NO: 3513 - DNA, 48 bp, synthetic construct
  source 1..48: mol_type = other DNA
attagctatgttcaaggcgaacgtcaagcccgtaatgttctgcgcgaa

SEQ ID NO: 3514 - DNA, 48 bp, synthetic construct
  source 1..48: mol_type = other DNA
gataaatttttacaagataaaaaattattaattagcatcctggagaaa

SEQ ID NO: 3515 - DNA, 48 bp, synthetic construct
  source 1..48: mol_type = other DNA
gcggaaggccaagcctatcgtgataacgttgcgcgtatcattaagaat

SEQ ID NO: 3516 - DNA, 48 bp, synthetic construct
  source 1..48: mol_type = other DNA
gaaggcgatttattcacccagctgcgcaagattgtgaagatggcgagc

SEQ ID NO: 3517 - DNA, 48 bp, synthetic construct
  source 1..48: mol_type = other DNA
ctggatgaattagttaaagaaaccaagaagaaaattatcgatacgctg

SEQ ID NO: 3518 - DNA, 48 bp, synthetic construct
  source 1..48: mol_type = other DNA
ccggcgaccgttgttaccgcgctggagcaactggcgcaccatcaccat

SEQ ID NO: 3519 - DNA, 48 bp, synthetic construct
  source 1..48: mol_type = other DNA
gcgcgtgaaatggccaacgcgaaagaaatcgcccgtaccgttcagatt

SEQ ID NO: 3520 - DNA, 48 bp, synthetic construct
  source 1..48: mol_type = other DNA
gtggaactgggtcgccagctgggcgccgcctatcagcgcctggacgat

SEQ ID NO: 3521 - DNA, 48 bp, synthetic construct
  source 1..48: mol_type = other DNA
cgtgatgaattaaaggcgctgattcaaaaggtgacccacaatttagtg

SEQ ID NO: 3522 - DNA, 48 bp, synthetic construct
  source 1..48: mol_type = other DNA
cgtagcgaattatctgatctgggcacgttaattaaagacaatttaaaa

SEQ ID NO: 3523 - DNA, 48 bp, synthetic construct
  source 1..48: mol_type = other DNA
gtgcaggatttaggtagcaccgtgatcaaggaagtgttaaaacgcgcg

SEQ ID NO: 3524 - DNA, 48 bp, synthetic construct
  source 1..48: mol_type = other DNA
attattccgcgcacgctgcatcagatcttcgaaaaattaaccgacaat

SEQ ID NO: 3525 - DNA, 48 bp, synthetic construct
  source 1..48: mol_type = other DNA
accaatgaattaaaggaaattgtgcgcaagattggcaaggatttaagc

SEQ ID NO: 3526 - DNA, 48 bp, synthetic construct
  source 1..48: mol_type = other DNA
ccgaccattcgcgagcgtattgaagccatgacggcggaagccagcaaa

SEQ ID NO: 3527 - DNA, 48 bp, synthetic construct
  source 1..48: mol_type = other DNA
caggaagcgcgcttaggcattaaaccacacattcagcgcctgttagat

SEQ ID NO: 3528 - DNA, 48 bp, synthetic construct
  source 1..48: mol_type = other DNA
accgcggatcgcgacattctggcgcgcttacataaagccgtgacgagc

SEQ ID NO: 3529 - DNA, 48 bp, synthetic construct
  source 1..48: mol_type = other DNA
gatggcgaattaaacctgatgaaaaaagccgccagcattacgagcgaa

SEQ ID NO: 3530 - DNA, 48 bp, synthetic construct
  source 1..48: mol_type = other DNA
accgatgcgatcaaccgtggcaatgagcgcctgctgcgctatttacag

SEQ ID NO: 3531 - DNA, 48 bp, synthetic construct
  source 1..48: mol_type = other DNA
cgtgaaaaagccttagaactggcggttgcccagattgagaaatcttat

SEQ ID NO: 3532 - DNA, 48 bp, synthetic construct
  source 1..48: mol_type = other DNA
ggcgatgtgaaggtttggatgcagaatctggaggacctgcatacgcgt

SEQ ID NO: 3533 - DNA, 48 bp, synthetic construct
  source 1..48: mol_type = other DNA
gaaaattttacgcaacgtgtgagcacgaacctggaaaagatgaaacag

SEQ ID NO: 3534 - DNA, 48 bp, synthetic construct
  source 1..48: mol_type = other DNA
catgcggcgggtgaccgtatgctgcaggaggttgcgacccgcctgagc

SEQ ID NO: 3535 - DNA, 48 bp, synthetic construct
  source 1..48: mol_type = other DNA
aaaaccgatcgcatcaaactggaacaagttattagcggtgcgttaaaa

SEQ ID NO: 3536 - DNA, 48 bp, synthetic construct
  source 1..48: mol_type = other DNA
gaaaaaagccgcgagtttgcggaaaagttaaatcgtgaggcgcgcgat

SEQ ID NO: 3537 - DNA, 48 bp, synthetic construct
  source 1..48: mol_type = other DNA
agcgcgaatacgaagcgtgtgatggatatcttcctgaaaatcaatgaa

SEQ ID NO: 3538 - DNA, 48 bp, synthetic construct
  source 1..48: mol_type = other DNA
cgtcaggaattagagctgagcgtgaagaaggaactggagaaaatcctg

SEQ ID NO: 3539 - DNA, 48 bp, synthetic construct
  source 1..48: mol_type = other DNA
agcgaacatttagccaaaatgctgagcaagcacctggaacgcgtgatt

SEQ ID NO: 3540 - DNA, 48 bp, synthetic construct
  source 1..48: mol_type = other DNA
gtgtttgaaacgttaaaagaagtgtctcgcctggtgttagcgcgcgtg

SEQ ID NO: 3541 - DNA, 48 bp, synthetic construct
  source 1..48: mol_type = other DNA
gatagcgtgaagatcgaagcggcgaagttaaaaaaatcttttttaacc

SEQ ID NO: 3542 - DNA, 48 bp, synthetic construct
  source 1..48: mol_type = other DNA
ccgaccgcgcgcgagcgtaccaccggtgccgtggatgccctgaaggcg

SEQ ID NO: 3543 - DNA, 48 bp, synthetic construct
  source 1..48: mol_type = other DNA
tttaaacagttagttgaagatctggaccgcattctgacgctgacgacc

SEQ ID NO: 3544 - DNA, 48 bp, synthetic construct
  source 1..48: mol_type = other DNA
accggcgcgatgatcacgggcaccatggtggacgagctggaacgccgt

SEQ ID NO: 3545 - DNA, 48 bp, synthetic construct
  source 1..48: mol_type = other DNA
gaaaccgtgttagagagctatcgtacgaacagcctgcgcaaaatcaat

SEQ ID NO: 3546 - DNA, 48 bp, synthetic construct
  source 1..48: mol_type = other DNA
gatctggaaaaggccaaaacccatttagttgtgctgtgggccagccag

SEQ ID NO: 3547 - DNA, 48 bp, synthetic construct
  source 1..48: mol_type = other DNA
aaacgtaccttaaaccgttatgaaaagatcgcgaatgacattgacgcg

SEQ ID NO: 3548 - DNA, 48 bp, synthetic construct
  source 1..48: mol_type = other DNA
gataaagcggccttcgcggcgcagaagcaaaaagcggacgcgttactg

SEQ ID NO: 3549 - DNA, 48 bp, synthetic construct
  source 1..48: mol_type = other DNA
caggcgctgaaggactatgaagcgcacttagcgagcttaggccgcagc

SEQ ID NO: 3550 - DNA, 48 bp, synthetic construct
  source 1..48: mol_type = other DNA
ccgaaaaccgttaacgaaatgattgatgccttcaccaaagcccgtgat

SEQ ID NO: 3551 - DNA, 48 bp, synthetic construct
  source 1..48: mol_type = other DNA
gcgggcctgtctgagaaagtggatcgcttacatagctacctgaaccgt

SEQ ID NO: 3552 - DNA, 48 bp, synthetic construct
  source 1..48: mol_type = other DNA
catcagggcgttgccattgataccttcgccaaagaagttgaaaagcgt

SEQ ID NO: 3553 - DNA, 48 bp, synthetic construct
  source 1..48: mol_type = other DNA
gtggaaaaatctgttgaaaccctgttagacctgattatgaagcgtatg

SEQ ID NO: 3554 - DNA, 48 bp, synthetic construct
  source 1..48: mol_type = other DNA
ccgaaagaaatccaaattcagattcgcaagtttgtgggtgaattaatt

SEQ ID NO: 3555 - DNA, 48 bp, synthetic construct
  source 1..48: mol_type = other DNA
gatgatgtgaagaagctggcggaagagacggaagcgcgcattaagagc

SEQ ID NO: 3556 - DNA, 48 bp, synthetic construct
  source 1..48: mol_type = other DNA
gatgatctgatggaggccgcggcgaaacgcttcaaagaacaagtgagc

SEQ ID NO: 3557 - DNA, 48 bp, synthetic construct
  source 1..48: mol_type = other DNA
atgcgtaatcacgccaaaaccgatcgcgtttttgatttagcggcccgt

SEQ ID NO: 3558 - DNA, 48 bp, synthetic construct
  source 1..48: mol_type = other DNA
gcgcgtcatatgcgcgagctgctgacccaaatgggtcatctgtacggc

SEQ ID NO: 3559 - DNA, 48 bp, synthetic construct
  source 1..48: mol_type = other DNA
ccgtataattctcgcgcggatgaattagcccgtctggccattaaggaa

SEQ ID NO: 3560 - DNA, 48 bp, synthetic construct
  source 1..48: mol_type = other DNA
accgatctgatcaagcgtattggccaagccaccgcgaaggaagttgcg

SEQ ID NO: 3561 - DNA, 48 bp, synthetic construct
  source 1..48: mol_type = other DNA
ccgtatggccgcgaccgtgatggccaagttgcggcggccctgaagacc

SEQ ID NO: 3562 - DNA, 48 bp, synthetic construct
  source 1..48: mol_type = other DNA
aaagaactggttttacgtattctgacggttcgtgaaaacctggccgaa

SEQ ID NO: 3563 - DNA, 48 bp, synthetic construct
  source 1..48: mol_type = other DNA
aaaaataccgccgaccaggtggcggttgaggcgatgcgtgagcgtatg

SEQ ID NO: 3564 - DNA, 48 bp, synthetic construct
  source 1..48: mol_type = other DNA
gcgaaaggccaacaagaagcggcgcgcgccggcgaattactgaaggaa

SEQ ID NO: 3565 - DNA, 48 bp, synthetic construct
  source 1..48: mol_type = other DNA
gatgtgctgtactctctgagcaaaacgttaaaagatgcccgtgacaaa

SEQ ID NO: 3566 - DNA, 48 bp, synthetic construct
  source 1..48: mol_type = other DNA
ctgaccgaattaaacagcctgatttctcgcctggcggacgatacgaaa

SEQ ID NO: 3567 - DNA, 48 bp, synthetic construct
  source 1..48: mol_type = other DNA
ggcaccaaagttacgaaaatggaagatgacatcaaaaaattactgggc

SEQ ID NO: 3568 - DNA, 48 bp, synthetic construct
  source 1..48: mol_type = other DNA
ggcctgcagcgcgccaaaaccggcacggacaaaaccttagtgaaggaa

SEQ ID NO: 3569 - DNA, 48 bp, synthetic construct
  source 1..48: mol_type = other DNA
ccggaaaaaacgaaggcggtggaaaactacctgattcaaatggcgcgt

SEQ ID NO: 3570 - DNA, 48 bp, synthetic construct
  source 1..48: mol_type = other DNA
gatgaaaaaacggccattaccaaaggttacgaagcgttaattaagcgt

SEQ ID NO: 3571 - DNA, 48 bp, synthetic construct
  source 1..48: mol_type = other DNA
gcggaagtgtacgacattattaaaaaggagagcaatcgccagcgcgtg

SEQ ID NO: 3572 - DNA, 48 bp, synthetic construct
  source 1..48: mol_type = other DNA
gcggcgcgtacggttcgtgcgcagttacgcgaatggctggccgaaatt

SEQ ID NO: 3573 - DNA, 48 bp, synthetic construct
  source 1..48: mol_type = other DNA
gtgagcagcatccgcgatgcggatcgcgttattggcttactggagagc

SEQ ID NO: 3574 - DNA, 48 bp, synthetic construct
  source 1..48: mol_type = other DNA
agcgcggaagccgttaaaaaaaccgccgaggatctggccaaagagctg

SEQ ID NO: 3575 - DNA, 48 bp, synthetic construct
  source 1..48: mol_type = other DNA
aatgcggtgtctttagtgatgcgtcgtatccgcaaagaaaacgtggat

SEQ ID NO: 3576 - DNA, 48 bp, synthetic construct
  source 1..48: mol_type = other DNA
ctgagccagcacgagcgttatgtggagcaactgaaacaagcgttaaaa

SEQ ID NO: 3577 - DNA, 48 bp, synthetic construct
  source 1..48: mol_type = other DNA
gaagcggatatgaagcgcgtggtgctgtctttagtgaccatgttacat

SEQ ID NO: 3578 - DNA, 48 bp, synthetic construct
  source 1..48: mol_type = other DNA
ccggaagcgatcaaccgtggcaatgagcgcctgctgcgctatttacag

SEQ ID NO: 3579 - DNA, 48 bp, synthetic construct
  source 1..48: mol_type = other DNA
gaaaaaacccgcgacgcggcgctgatcttagcgcagaaggcgcacgcg

SEQ ID NO: 3580 - DNA, 48 bp, synthetic construct
  source 1..48: mol_type = other DNA
aaaaatgaattagttcagcgtctgatcaaggatgatgaggaatctaaa

SEQ ID NO: 3581 - DNA, 48 bp, synthetic construct
  source 1..48: mol_type = other DNA
atttttgaacgcttaaccagcgaattattaggcgtgatggccaaaaaa

SEQ ID NO: 3582 - DNA, 48 bp, synthetic construct
  source 1..48: mol_type = other DNA
atggaagaaatgcgcaaggaaattattgccgttattcagaagtatacc

SEQ ID NO: 3583 - DNA, 48 bp, synthetic construct
  source 1..48: mol_type = other DNA
ctggatgatgttgactttattaataagcgcattaccgttctggccaat

SEQ ID NO: 3584 - DNA, 48 bp, synthetic construct
  source 1..48: mol_type = other DNA
attgcgacccgcaagaaatgggtgagcttagttgaaggcgttaaagaa

SEQ ID NO: 3585 - DNA, 48 bp, synthetic construct
  source 1..48: mol_type = other DNA
cgtgcggaattagacgcgctgctgacgcaagcggcgttatttaagcgt

SEQ ID NO: 3586 - DNA, 48 bp, synthetic construct
  source 1..48: mol_type = other DNA
gcgcaggaattagacattaaagcgcgcaactttctgatcaataagaaa

SEQ ID NO: 3587 - DNA, 48 bp, synthetic construct
  source 1..48: mol_type = other DNA
gaaaaaagcatcttaggcgcgaaagaggccctgagcatcctgaaccgt

SEQ ID NO: 3588 - DNA, 48 bp, synthetic construct
  source 1..48: mol_type = other DNA
aatgaactgcgcgaggcgctgaataaggcctttgcggagatgcgtgcg

SEQ ID NO: 3589 - DNA, 48 bp, synthetic construct
  source 1..48: mol_type = other DNA
gataaaggcttccaaaaagtgattgccgacatgagcggcccacatgtg

SEQ ID NO: 3590 - DNA, 48 bp, synthetic construct
  source 1..48: mol_type = other DNA
ctgagctatcgcgaggcggtgctgcgcgccgtggatcgcctgaacgaa

SEQ ID NO: 3591 - DNA, 48 bp, synthetic construct
  source 1..48: mol_type = other DNA
catctgagcggtgacgaagtgctgaagacggtgagcaagcgtatcctg

SEQ ID NO: 3592 - DNA, 48 bp, synthetic construct
  source 1..48: mol_type = other DNA
accgaactgaagaagattaccgataagacgattaaagcctttatggat

SEQ ID NO: 3593 - DNA, 48 bp, synthetic construct
  source 1..48: mol_type = other DNA
tttcgtgatttagccctgcgtgtggaccaaattcgtgacaatatggcg

SEQ ID NO: 3594 - DNA, 48 bp, synthetic construct
  source 1..48: mol_type = other DNA
gtgcaggatatcgagcgtgcggtggccaagctggcgcaaaaattaaaa

SEQ ID NO: 3595 - DNA, 48 bp, synthetic construct
  source 1..48: mol_type = other DNA
gtggaaattggtgagaaaattgcgcaaatcgcgattgaccgtgccagc

SEQ ID NO: 3596 - DNA, 48 bp, synthetic construct
  source 1..48: mol_type = other DNA
gcgcatacctacatcgcggcgaaaaagatcgaaaatgaggcgaagaaa

SEQ ID NO: 3597 - DNA, 48 bp, synthetic construct
  source 1..48: mol_type = other DNA
gaagaaaccttaatcaatcatgcgaaggcctgggcgagcgccattcgt

SEQ ID NO: 3598 - DNA, 48 bp, synthetic construct
  source 1..48: mol_type = other DNA
cgtgcggaacgccgcgaagtggaaaacgttgtggtgacggcgttagcg

SEQ ID NO: 3599 - DNA, 48 bp, synthetic construct
  source 1..48: mol_type = other DNA
accaatctgacgaagctggaagtgttattagaaatttctgataagctg

SEQ ID NO: 3600 - DNA, 48 bp, synthetic construct
  source 1..48: mol_type = other DNA
ccggaatttcgcgagaaagcgctgaaggccatggaaaccgagcgtcag

SEQ ID NO: 3601 - DNA, 48 bp, synthetic construct
  source 1..48: mol_type = other DNA
gatgcgattaaccaaaaagcgcaggagttagcgcgtaaggcggttgcg

SEQ ID NO: 3602 - DNA, 48 bp, synthetic construct
  source 1..48: mol_type = other DNA
ccgcgtgaattattaattgcgcgtcaagccgcgaatgttattgagcat

SEQ ID NO: 3603 - DNA, 48 bp, synthetic construct
  source 1..48: mol_type = other DNA
caggaagaagccttagaactgattaacggttatattcaaaaaatcaaa

SEQ ID NO: 3604 - DNA, 48 bp, synthetic construct
  source 1..48: mol_type = other DNA
gatgaacgtaaccgccagattgcggagatcggcgcgtctctgatcaaa

SEQ ID NO: 3605 - DNA, 48 bp, synthetic construct
  source 1..48: mol_type = other DNA
ctgaaagaagccatggacctgggcaccgaggccgcgaaatacgtgagc

SEQ ID NO: 3606 - DNA, 48 bp, synthetic construct
  source 1..48: mol_type = other DNA
gcgcatattcaacacgataaaaccacgtctgcgctgaagattttaagc

SEQ ID NO: 3607 - DNA, 48 bp, synthetic construct
  source 1..48: mol_type = other DNA
gcgagcctgaaggagtttctgaaatctttactggaagccattatcaaa

SEQ ID NO: 3608 - DNA, 48 bp, synthetic construct
  source 1..48: mol_type = other DNA
agcgaaaccgttgaccgtgcgttttctcaaatgaaagcggccattcgt

SEQ ID NO: 3609 - DNA, 48 bp, synthetic construct
  source 1..48: mol_type = other DNA
cgtgaaaatttcgagattctgatgaaattaaaggaaagcttagaactg

SEQ ID NO: 3610 - DNA, 48 bp, synthetic construct
  source 1..48: mol_type = other DNA
ccgcagctggcccacgatcgtattacggaggcggcgcgccaggttcgt

SEQ ID NO: 3611 - DNA, 48 bp, synthetic construct
  source 1..48: mol_type = other DNA
gcgccgtatcgcaaggaacagcgtttacgcgaagtgttaagcggtctg

SEQ ID NO: 3612 - DNA, 48 bp, synthetic construct
  source 1..48: mol_type = other DNA
cgtcaggaagttcaagataccgcgcgcggtcagattaacgattacatt

SEQ ID NO: 3613 - DNA, 48 bp, synthetic construct
  source 1..48: mol_type = other DNA
atgaccctggccaagaccgaagcgaagttactgcatgagaaaatcagc

SEQ ID NO: 3614 - DNA, 48 bp, synthetic construct
  source 1..48: mol_type = other DNA
agcgatctggtttacgaaaccattaaccgcgtgaaacgcattaaggat

SEQ ID NO: 3615 - DNA, 48 bp, synthetic construct
  source 1..48: mol_type = other DNA
cgtcgtaaattcgaggaagtggatacgaacctgaaagttctgttacat

SEQ ID NO: 3616 - DNA, 48 bp, synthetic construct
  source 1..48: mol_type = other DNA
ctggatcgtttacgccagtttattggtgagctggcgacgctgttagat

SEQ ID NO: 3617 - DNA, 48 bp, synthetic construct
  source 1..48: mol_type = other DNA
gtgagcaaaatgaacgacatggtgaaactggttgagaaactgttagcg

SEQ ID NO: 3618 - DNA, 48 bp, synthetic construct
  source 1..48: mol_type = other DNA
ggcggcgaagccaaggcggtggaaacgttaaaacagcaaattcaaaaa

SEQ ID NO: 3619 - DNA, 48 bp, synthetic construct
  source 1..48: mol_type = other DNA
aaagaagatgttgacgtggcggtggccgccgcgaaaacggcgttaacc

SEQ ID NO: 3620 - DNA, 48 bp, synthetic construct
  source 1..48: mol_type = other DNA
gcgaccgatgtttctaaacgtctggacttagcggtgcgcctgttaatt

SEQ ID NO: 3621 - DNA, 48 bp, synthetic construct
  source 1..48: mol_type = other DNA
cgtgaagaagccatcagcaatatggtggttgccctgaaagagctgagc

SEQ ID NO: 3622 - DNA, 48 bp, synthetic construct
  source 1..48: mol_type = other DNA
gcggtgattgagatgacgaaaaaagtgaagccacatctggttgcgagc

SEQ ID NO: 3623 - DNA, 48 bp, synthetic construct
  source 1..48: mol_type = other DNA
gcggtgattgagatgacgcagaaaaccaaggagcatctgatcaaaacc

SEQ ID NO: 3624 - DNA, 48 bp, synthetic construct
  source 1..48: mol_type = other DNA
ctgagcgcggccgagcatctgctgaaggcccaggaacacctgatcggc

SEQ ID NO: 3625 - DNA, 48 bp, synthetic construct
  source 1..48: mol_type = other DNA
gataatgatcgcgcctttaccattaagaagctggcggagctggttaaa

SEQ ID NO: 3626 - DNA, 48 bp, synthetic construct
  source 1..48: mol_type = other DNA
aaagaagaacacacggaactggtgaaggacctgattgccaaattaaat

SEQ ID NO: 3627 - DNA, 48 bp, synthetic construct
  source 1..48: mol_type = other DNA
acccagcattgggttttagaaggcattgagcgcgcggtgaaggaagcg

SEQ ID NO: 3628 - DNA, 48 bp, synthetic construct
  source 1..48: mol_type = other DNA
ggcgatagccaagacaccgcgtataaggttagccagttagcggaccgt

SEQ ID NO: 3629 - DNA, 48 bp, synthetic construct
  source 1..48: mol_type = other DNA
ggcgcgcgtttagccgaatatcatgccaaggcgaccgagcatttaagc

SEQ ID NO: 3630 - DNA, 48 bp, synthetic construct
  source 1..48: mol_type = other DNA
tataaaaaacgcttaaatgaactgatcacggatgcgttaattacgagc

SEQ ID NO: 3631 - DNA, 48 bp, synthetic construct
  source 1..48: mol_type = other DNA
cgtcaggaagccttagaactgattaagaagggctatacgcagcaactg

SEQ ID NO: 3632 - DNA, 48 bp, synthetic construct
  source 1..48: mol_type = other DNA
agcgtgcgtatgcgcgccattcagaatcgcttactgcatgagctgggc

SEQ ID NO: 3633 - DNA, 48 bp, synthetic construct
  source 1..48: mol_type = other DNA
agcgaaccgttattacatctgcgtgagaagattgcgcgcctggttacc

SEQ ID NO: 3634 - DNA, 48 bp, synthetic construct
  source 1..48: mol_type = other DNA
cgtggccatcaaaagctgattaatgccacggtggaaaaggcgcgcgaa

SEQ ID NO: 3635 - DNA, 48 bp, synthetic construct
  source 1..48: mol_type = other DNA
ctggaaagctctcacgcgctggcgcacgccctgaaaatgatgcgcgaa

SEQ ID NO: 3636 - DNA, 48 bp, synthetic construct
  source 1..48: mol_type = other DNA
aaacagaccgagtctcatgcggtgaagatcgtggtggaggcggcccgt

SEQ ID NO: 3637 - DNA, 48 bp, synthetic construct
  source 1..48: mol_type = other DNA
ccggaagatatgttagagcagtttaaaacggttcgtgcgttaattcgt

SEQ ID NO: 3638 - DNA, 48 bp, synthetic construct
  source 1..48: mol_type = other DNA
gaagatgatgttaagagcctgagccgcgttatgattcatgtttttagc

SEQ ID NO: 3639 - DNA, 48 bp, synthetic construct
  source 1..48: mol_type = other DNA
gcgtatgcggacgttattgtgaattctgccctggaaaagctgcgcaaa

SEQ ID NO: 3640 - DNA, 48 bp, synthetic construct
  source 1..48: mol_type = other DNA
atttatgaacacttacagaaactggttcaagcggaattaaaattaatt

SEQ ID NO: 3641 - DNA, 48 bp, synthetic construct
  source 1..48: mol_type = other DNA
aaagatgcgttcttactgattcagcgcttaacccgtatcattttacat

SEQ ID NO: 3642 - DNA, 48 bp, synthetic construct
  source 1..48: mol_type = other DNA
gaacagggcaaccgcgaagcgcgtcaagccggccagttactgaaggaa

SEQ ID NO: 3643 - DNA, 48 bp, synthetic construct
  source 1..48: mol_type = other DNA
caggcgaccttagacaaactggaagccggttttaaaaagctgcaagaa

SEQ ID NO: 3644 - DNA, 48 bp, synthetic construct
  source 1..48: mol_type = other DNA
gcggtgatttacttaattagccataagttagtgaaaaagagcttagat

SEQ ID NO: 3645 - DNA, 48 bp, synthetic construct
  source 1..48: mol_type = other DNA
cgtgtgcataagatcaataatgtgaacaaggcgctggactttatcgcg

SEQ ID NO: 3646 - DNA, 48 bp, synthetic construct
  source 1..48: mol_type = other DNA
tttgataccgccttaaccgatctgaagacgattattcgcgcggagcgt

SEQ ID NO: 3647 - DNA, 48 bp, synthetic construct
  source 1..48: mol_type = other DNA
gatggcacccaacgcggcgcgctggttatcagccaggaggcgaagcgt

SEQ ID NO: 3648 - DNA, 48 bp, synthetic construct
  source 1..48: mol_type = other DNA
gatgcgcagaagatcgcgattgataagttatttagcatgttaaaagat

SEQ ID NO: 3649 - DNA, 48 bp, synthetic construct
  source 1..48: mol_type = other DNA
aatcatgtgaacgaggcgctgaaagccttaaaacagatcaaagaggaa

SEQ ID NO: 3650 - DNA, 48 bp, synthetic construct
  source 1..48: mol_type = other DNA
gaacgtgatcgcacgcatagcattatcaagggcattaaggatcgcacc

SEQ ID NO: 3651 - DNA, 48 bp, synthetic construct
  source 1..48: mol_type = other DNA
aaacaggtgggtgccctgaaaagcatggttgaggataaaatccagaaa

SEQ ID NO: 3652 - DNA, 48 bp, synthetic construct
  source 1..48: mol_type = other DNA
gtgtatggcaagacgaaactggcgggtgagaaagcgttacaggacaat

SEQ ID NO: 3653 - DNA, 48 bp, synthetic construct
  source 1..48: mol_type = other DNA
agcgaagcggccaaccagcgtctggaggccggcaaatctgcggttgaa

SEQ ID NO: 3654 - DNA, 48 bp, synthetic construct
  source 1..48: mol_type = other DNA
aaagaacaggttcaagcgagcctggagaacatggcgaaagttgtggat

SEQ ID NO: 3655 - DNA, 48 bp, synthetic construct
  source 1..48: mol_type = other DNA
caggaaacccaaaagggcgcgctgaaggagattcaggcctttatccgt

SEQ ID NO: 3656 - DNA, 48 bp, synthetic construct
  source 1..48: mol_type = other DNA
ccgcgtgcgaagaaggtgctggaattatctctgcgtgagggcttacag

SEQ ID NO: 3657 - DNA, 48 bp, synthetic construct
  source 1..48: mol_type = other DNA
aaactgcattctcaagcgaatctgatgcgcttaaaaagcgacctgttt

SEQ ID NO: 3658 - DNA, 48 bp, synthetic construct
  source 1..48: mol_type = other DNA
ggcgaagcgtacaagcagcaggtggcccgcgcggtggccgaaatccgt

SEQ ID NO: 3659 - DNA, 48 bp, synthetic construct
  source 1..48: mol_type = other DNA
aaagaagatttcggtaaactgatgaccaagaaccatgaattactgaaa

SEQ ID NO: 3660 - DNA, 48 bp, synthetic construct
  source 1..48: mol_type = other DNA
aaagaagcggcctctgtgacccgtgaccacatggtgatggtgggtacc

SEQ ID NO: 3661 - DNA, 48 bp, synthetic construct
  source 1..48: mol_type = other DNA
cgtaccgaagccgccaatgtggaaaagatcaccaccaagctgttaaaa

SEQ ID NO: 3662 - DNA, 48 bp, synthetic construct
  source 1..48: mol_type = other DNA
gtgggcgatgacttcagccgtgtggttaaccgtcagttagatcaaacc

SEQ ID NO: 3663 - DNA, 48 bp, synthetic construct
  source 1..48: mol_type = other DNA
gcgggcgaacgcatcgtggatattatcgccaccgatatccagacgaaa

SEQ ID NO: 3664 - DNA, 48 bp, synthetic construct
  source 1..48: mol_type = other DNA
gtgggcgatgccatcagcgcgctgtctcgcaaaattgccaaagagacc

SEQ ID NO: 3665 - DNA, 48 bp, synthetic construct
  source 1..48: mol_type = other DNA
cgtcaggcgatcttcgaaaccctggttgccaaaggccgcgaattactg

SEQ ID NO: 3666 - DNA, 48 bp, synthetic construct
  source 1..48: mol_type = other DNA
agcgtgggcgccaagaccctgaaatctgttattaaagagtataacgaa

SEQ ID NO: 3667 - DNA, 48 bp, synthetic construct
  source 1..48: mol_type = other DNA
attgatctgcaaaaggaagtggaagccttactggataagcagatcaaa

SEQ ID NO: 3668 - DNA, 48 bp, synthetic construct
  source 1..48: mol_type = other DNA
aatgcgagcgaccgcctgctggaaatcatgcgcctgtatcaaaaacag

SEQ ID NO: 3669 - DNA, 48 bp, synthetic construct
  source 1..48: mol_type = other DNA
attgatgcggcccacaaagaaattacggacggcgtggccaatttcaaa

SEQ ID NO: 3670 - DNA, 48 bp, synthetic construct
  source 1..48: mol_type = other DNA
gatgaatggaaaaacaagctggatagcttaatcgatcgtatcattaaa

SEQ ID NO: 3671 - DNA, 48 bp, synthetic construct
  source 1..48: mol_type = other DNA
ggccgtgaatctgttggctttctggttacgattaaagagctgttagaa

SEQ ID NO: 3672 - DNA, 48 bp, synthetic construct
  source 1..48: mol_type = other DNA
gtggaaaaagttttaaaaacccgttaccacgatgcgacgagcaagctg

SEQ ID NO: 3673 - DNA, 48 bp, synthetic construct
  source 1..48: mol_type = other DNA
ccgaaagtgatcaaccgtctggcgcacgaggtgattgaggcgcaacag

SEQ ID NO: 3674 - DNA, 48 bp, synthetic construct
  source 1..48: mol_type = other DNA
agcctggcggagatgggtgcgaatcgtttatggaagctgattcacgaa

SEQ ID NO: 3675 - DNA, 48 bp, synthetic construct
  source 1..48: mol_type = other DNA
cgtaatgattaccgcaccctgcgtcaaggtattattgacatggtgctg

SEQ ID NO: 3676 - DNA, 48 bp, synthetic construct
  source 1..48: mol_type = other DNA
gtgcgtggccgcttagcggaaaccttattaattctgaaggaaaacttt

SEQ ID NO: 3677 - DNA, 48 bp, synthetic construct
  source 1..48: mol_type = other DNA
ctgggccgtgagaaggcggtgcaggaggccattcgtgacctgatccag

SEQ ID NO: 3678 - DNA, 48 bp, synthetic construct
  source 1..48: mol_type = other DNA
agcccgcgtgagacgctgaccgatacgatcatgatggcgaaaatccgt

SEQ ID NO: 3679 - DNA, 48 bp, synthetic construct
  source 1..48: mol_type = other DNA
ggcccggataacttacgtaaaggcatcgagctggcggttgcggagacc

SEQ ID NO: 3680 - DNA, 48 bp, synthetic construct
  source 1..48: mol_type = other DNA
cgtgaaaccttagagattagctatcgcaacgcgattgcccgtttaagc

SEQ ID NO: 3681 - DNA, 48 bp, synthetic construct
  source 1..48: mol_type = other DNA
ccggcggattgggccaagaaactgaccgacgccgtgctgcgccagaaa

SEQ ID NO: 3682 - DNA, 48 bp, synthetic construct
  source 1..48: mol_type = other DNA
attagcaccttagactttgaaattcgccaccagctgacgcagatccat

SEQ ID NO: 3683 - DNA, 48 bp, synthetic construct
  source 1..48: mol_type = other DNA
aaaaccgtgaacatgatggagctgattaataacatcgcgaaagagcat

SEQ ID NO: 3684 - DNA, 48 bp, synthetic construct
  source 1..48: mol_type = other DNA
cagcatctgcacacgctgctggatttatacgataaaatcaatacgaaa

SEQ ID NO: 3685 - DNA, 48 bp, synthetic construct
  source 1..48: mol_type = other DNA
aaaccgcaggttttcgcgaatgcggagaagattgtggagcagttaaaa

SEQ ID NO: 3686 - DNA, 48 bp, synthetic construct
  source 1..48: mol_type = other DNA
ccggatcagcaacgcgattttcagcgcgagattcagatcctgaaggcg

SEQ ID NO: 3687 - DNA, 48 bp, synthetic construct
  source 1..48: mol_type = other DNA
ctggaaggcttattaagccagatgaaagccatcgatgatttagtgaaa

SEQ ID NO: 3688 - DNA, 48 bp, synthetic construct
  source 1..48: mol_type = other DNA
tttgaaaccaacgttcgtgaaaccaagcgcgtggtggaggcggcccat

SEQ ID NO: 3689 - DNA, 48 bp, synthetic construct
  source 1..48: mol_type = other DNA
ccggatgatacggcccgtattctgcgcgagtttctgtctgatgcccgt

SEQ ID NO: 3690 - DNA, 48 bp, synthetic construct
  source 1..48: mol_type = other DNA
gaagcgcgtcaacgcctggtggaagcccaaattaaagaggcggttctg

SEQ ID NO: 3691 - DNA, 48 bp, synthetic construct
  source 1..48: mol_type = other DNA
aaaaccgaattattacgtgcggtggccgaccgtattttactgtctgcg

SEQ ID NO: 3692 - DNA, 48 bp, synthetic construct
  source 1..48: mol_type = other DNA
ccggatcataaggccacccgtgatgccacgctgctggccgcgcgcgaa

SEQ ID NO: 3693 - DNA, 48 bp, synthetic construct
  source 1..48: mol_type = other DNA
attagcaccttagactttaaaattcgccaccagctgacgcagacgcat

SEQ ID NO: 3694 - DNA, 48 bp, synthetic construct
  source 1..48: mol_type = other DNA
aaaagcaaaaagttagaatttctgttaaaggtgagcgaccgtttagaa

SEQ ID NO: 3695 - DNA, 48 bp, synthetic construct
  source 1..48: mol_type = other DNA
gcgagcctggttaagagccgtctggagcacgaactgggtcgtatccgt

SEQ ID NO: 3696 - DNA, 48 bp, synthetic construct
  source 1..48: mol_type = other DNA
tttgtggaaaacgccattattaaagcccgccatgcggccaaacaaacc

SEQ ID NO: 3697 - DNA, 48 bp, synthetic construct
  source 1..48: mol_type = other DNA
ctggcggcgcgcaaggattttcagcgcgaggcggaattactgacgaat

SEQ ID NO: 3698 - DNA, 48 bp, synthetic construct
  source 1..48: mol_type = other DNA
aatcagcgtgccgccattgtggaaaagaagattgaattagcgaagacc

SEQ ID NO: 3699 - DNA, 48 bp, synthetic construct
  source 1..48: mol_type = other DNA
gatgaagcggttgccaaatttagcacggccattaatgagctgaaggcg

SEQ ID NO: 3700 - DNA, 48 bp, synthetic construct
  source 1..48: mol_type = other DNA
gatagcacccgcgagaccgtgctgaagcaaattcgtgagtttttagaa

SEQ ID NO: 3701 - DNA, 48 bp, synthetic construct
  source 1..48: mol_type = other DNA
gaaatggaacgcgagcagctggaagttttaaaacagcgcggcatcgcg

SEQ ID NO: 3702 - DNA, 48 bp, synthetic construct
  source 1..48: mol_type = other DNA
atggatgaacgcaaccgtcagattgccgagattggcgccagcttaatt

SEQ ID NO: 3703 - DNA, 48 bp, synthetic construct
  source 1..48: mol_type = other DNA
gcgctgaatgagaagctggtgaaagagacgctgcagttagcggagcag

SEQ ID NO: 3704 - DNA, 48 bp, synthetic construct
  source 1..48: mol_type = other DNA
cgtgatgaattagttgaaaaagtgaacaagaccctggccaaacgcctg

SEQ ID NO: 3705 - DNA, 48 bp, synthetic construct
  source 1..48: mol_type = other DNA
aaagaagcgaagaacgcggcggcgaagttagcggtggagattttaaat

SEQ ID NO: 3706 - DNA, 48 bp, synthetic construct
  source 1..48: mol_type = other DNA
gcggatgcgatgaaccgcgaagtgagctctttaaaaaataagctgcgt

SEQ ID NO: 3707 - DNA, 48 bp, synthetic construct
  source 1..48: mol_type = other DNA
catcgtctgatcgaccaggcgaccgccgagattgtggagaccgccaaa

SEQ ID NO: 3708 - DNA, 48 bp, synthetic construct
  source 1..48: mol_type = other DNA
ccgaaatttaagaagattctgagcttaatggaccatgtggaggaacag

SEQ ID NO: 3709 - DNA, 48 bp, synthetic construct
  source 1..48: mol_type = other DNA
caggcggcggcctctgaatggcgtgcgcgcgttgtggatgccctgaaa

SEQ ID NO: 3710 - DNA, 48 bp, synthetic construct
  source 1..48: mol_type = other DNA
acccagggcgttaagcgtatgaatggcttcatccaggcgcaccgtgaa

SEQ ID NO: 3711 - DNA, 48 bp, synthetic construct
  source 1..48: mol_type = other DNA
gtggcgaatgccgttcagaaaattaagggtattgtggagaccgagcat

SEQ ID NO: 3712 - DNA, 48 bp, synthetic construct
  source 1..48: mol_type = other DNA
atggatagcaagaagtatgtgcagttaaagcataaagccgcggccgaa

SEQ ID NO: 3713 - DNA, 48 bp, synthetic construct
  source 1..48: mol_type = other DNA
agcaaaaccggtgagaaaattatgcagttattaaaaaaattaaatgaa

SEQ ID NO: 3714 - DNA, 48 bp, synthetic construct
  source 1..48: mol_type = other DNA
cgtaccgaattaaaggaaattgtgacgtctgatctgaagcagttactg

SEQ ID NO: 3715 - DNA, 48 bp, synthetic construct
  source 1..48: mol_type = other DNA
ggccgtgtggttttagatgaagcggttaagctgctgaagcaggccagc

SEQ ID NO: 3716 - DNA, 48 bp, synthetic construct
  source 1..48: mol_type = other DNA
cgtgaactgatggagacgggccgtagcgttgttcagaaatacctgaat

SEQ ID NO: 3717 - DNA, 48 bp, synthetic construct
  source 1..48: mol_type = other DNA
caggaactggagttaagcctgaatatggccttcgcgcgtgcccgtgaa

SEQ ID NO: 3718 - DNA, 48 bp, synthetic construct
  source 1..48: mol_type = other DNA
ccgcaggtggacaaggtgcgtgaagccacggaaattgccaccggtctg

SEQ ID NO: 3719 - DNA, 48 bp, synthetic construct
  source 1..48: mol_type = other DNA
ggccatgaaaagttaacccaggcgcgcaaccagctgttagcggaggcg

SEQ ID NO: 3720 - DNA, 48 bp, synthetic construct
  source 1..48: mol_type = other DNA
ctggaaaaaacgcgcgaactgaaagaggttctgaataaggtgaagtat

SEQ ID NO: 3721 - DNA, 48 bp, synthetic construct
  source 1..48: mol_type = other DNA
ccgctgaccgttaagaaacatctgcgcgcccaggcgatcgcgttagaa

SEQ ID NO: 3722 - DNA, 48 bp, synthetic construct
  source 1..48: mol_type = other DNA
aatcagctgcaaaacggcattaaacgcgttaaagaattcctggagagc

SEQ ID NO: 3723 - DNA, 48 bp, synthetic construct
  source 1..48: mol_type = other DNA
agcaccgtggccgagaaaagcctgacggagctgctgaagagcttacat

SEQ ID NO: 3724 - DNA, 48 bp, synthetic construct
  source 1..48: mol_type = other DNA
gatacccatcgccgcctggtgatggaaacgttaattaaagccggcgat

SEQ ID NO: 3725 - DNA, 48 bp, synthetic construct
  source 1..48: mol_type = other DNA
gaaaatgtgaagaagaaactgagcttagccctggaagccgcgaagatg

SEQ ID NO: 3726 - DNA, 48 bp, synthetic construct
  source 1..48: mol_type = other DNA
gcggatctggttaagtttggccagcgcttacgtgaattacgtacggcg

SEQ ID NO: 3727 - DNA, 48 bp, synthetic construct
  source 1..48: mol_type = other DNA
ggcccgaaagttcgcacctggctgagcgagaacggcgaagagcgtctg

SEQ ID NO: 3728 - DNA, 48 bp, synthetic construct
  source 1..48: mol_type = other DNA
agcattattcgcgacctgaccgatgccgccgtgaaaatggttcgtgtg

SEQ ID NO: 3729 - DNA, 48 bp, synthetic construct
  source 1..48: mol_type = other DNA
cgtgaagcggccgttgaacagctgaagtctattcgtgaggatatcgtg

SEQ ID NO: 3730 - DNA, 51 bp, synthetic construct
  source 1..51: mol_type = other DNA
gcgaaaggccaacaagaagcggcgcgcgccggcgaattactgaaggaaaaa

SEQ ID NO: 3731 - DNA, 51 bp, synthetic construct
  source 1..51: mol_type = other DNA
gatgaacatgccgttgaagcggtgcgcggtggccagtacattttacagcgt

SEQ ID NO: 3732 - DNA, 51 bp, synthetic construct
  source 1..51: mol_type = other DNA
cgtgatgcgggtcaactgtatagcaagggtatggaaagcttaaaagttatg

SEQ ID NO: 3733 - DNA, 51 bp, synthetic construct
  source 1..51: mol_type = other DNA
accgcgattatcgaccagattctgaagttacgtctggagaaagccaaactg

SEQ ID NO: 3734 - DNA, 51 bp, synthetic construct
  source 1..51: mol_type = other DNA
tttgaaaccgttcgcagcgcggcgaagacgattcgtgaggcgttagatgcg

SEQ ID NO: 3735 - DNA, 51 bp, synthetic construct
  source 1..51: mol_type = other DNA
ctggcggaagcccaagcggattttttaacgcgtgtgttacagcgcctggaa

SEQ ID NO: 3736 - DNA, 51 bp, synthetic construct
  source 1..51: mol_type = other DNA
agcgcggcgatccgcgaaatgctgggccacttcagcgatgccaatcaaaaa

SEQ ID NO: 3737 - DNA, 51 bp, synthetic construct
  source 1..51: mol_type = other DNA
cgtaccggcacgttcattgtgattgacatcctgattgacattatccgtgaa

SEQ ID NO: 3738 - DNA, 51 bp, synthetic construct
  source 1..51: mol_type = other DNA
aatgaaacccgcaagagcctgattgccggtcatatgaccgagattatgcag

SEQ ID NO: 3739 - DNA, 51 bp, synthetic construct
  source 1..51: mol_type = other DNA
agcggcgaacgcgaccgtacccattctatcattaaaggtattaaggatcgt

SEQ ID NO: 3740 - DNA, 51 bp, synthetic construct
  source 1..51: mol_type = other DNA
tttaaacagttagttgaagcgctggacaaggtgctgttagcggttagcgaa

SEQ ID NO: 3741 - DNA, 51 bp, synthetic construct
  source 1..51: mol_type = other DNA
agcgaagtggacatccagggcagcatggcctacgcgaaagccctggagaaa

SEQ ID NO: 3742 - DNA, 51 bp, synthetic construct
  source 1..51: mol_type = other DNA
agcctgctgaagcgcacctgggaacaggccgttaaaggcttaaatgagagc

SEQ ID NO: 3743 - DNA, 51 bp, synthetic construct
  source 1..51: mol_type = other DNA
ccggtggatcaagccaccctgaccgccttccgtgatatgcgcgcggcccat

SEQ ID NO: 3744 - DNA, 51 bp, synthetic construct
  source 1..51: mol_type = other DNA
gcgagcgaacgcggtcgtctgctgaaccgcctggcggacctgatcgaacgt

SEQ ID NO: 3745 - DNA, 51 bp, synthetic construct
  source 1..51: mol_type = other DNA
gatcgtgaaaaggccctggaactggccgttgcgcagatcgaaaagagctat

SEQ ID NO: 3746 - DNA, 51 bp, synthetic construct
  source 1..51: mol_type = other DNA
ccggatcgtgagaaggcgctggaattagccgtggcgcaaattgagaaaagc

SEQ ID NO: 3747 - DNA, 51 bp, synthetic construct
  source 1..51: mol_type = other DNA
ggcgaaaccaagacgaaatatgatgccatgaagaaagataacgtggagagc

SEQ ID NO: 3748 - DNA, 51 bp, synthetic construct
  source 1..51: mol_type = other DNA
aaagcggaattacaaaaagcggcgcaagacgcgaaagccgcgtacgaagcg

SEQ ID NO: 3749 - DNA, 51 bp, synthetic construct
  source 1..51: mol_type = other DNA
ctggaagcggttatggacgcgattcgtacgacggtgacccactgggtgaaa

SEQ ID NO: 3750 - DNA, 51 bp, synthetic construct
  source 1..51: mol_type = other DNA
gtgaaagaaacggttgaagcgatgcgtgttgttgaagcgacgctgtctgcg

SEQ ID NO: 3751 - DNA, 51 bp, synthetic construct
  source 1..51: mol_type = other DNA
gtgagcaccaacgttaccaccgcggagcgcctggtgcgcgcggcccataaa

SEQ ID NO: 3752 - DNA, 51 bp, synthetic construct
  source 1..51: mol_type = other DNA
gcgaccctggaggccgaatataatttagagcgtgcgcaaaaagccgtgaat

SEQ ID NO: 3753 - DNA, 51 bp, synthetic construct
  source 1..51: mol_type = other DNA
gcggcgcaggttaaggatgcgctgacgaagatgcgtgcggccgcgttagat

SEQ ID NO: 3754 - DNA, 51 bp, synthetic construct
  source 1..51: mol_type = other DNA
gcgagcgataagttatgggtgacccgtgttatcgcgcatgagctggcccat

SEQ ID NO: 3755 - DNA, 51 bp, synthetic construct
  source 1..51: mol_type = other DNA
gcggaaaaattattcaatcaggatgttgacgcggcggttcgtggtattctg

SEQ ID NO: 3756 - DNA, 51 bp, synthetic construct
  source 1..51: mol_type = other DNA
attcaggaacacatcaatcgtctggttgccattcgtgcccaggccgatatt

SEQ ID NO: 3757 - DNA, 51 bp, synthetic construct
  source 1..51: mol_type = other DNA
aaagcggaatctgacgcggcgtatgagcgccaggcgcgcaaaatcctggaa

SEQ ID NO: 3758 - DNA, 51 bp, synthetic construct
  source 1..51: mol_type = other DNA
ggcaccgatttaatgaactttctgaaaacggttcgtagcacgaccgagaaa

SEQ ID NO: 3759 - DNA, 51 bp, synthetic construct
  source 1..51: mol_type = other DNA
aatgatgaaatgaaggccgtggcggatgcctacaaacaggttctgaaggat

SEQ ID NO: 3760 - DNA, 51 bp, synthetic construct
  source 1..51: mol_type = other DNA
aaagaaagcgttgaggcgatgattattgccggtaaaagcgccaatgagcat

SEQ ID NO: 3761 - DNA, 51 bp, synthetic construct
  source 1..51: mol_type = other DNA
tgggataaaacgggtgatattctggccgaggcggcgttaggcttacagcgt

SEQ ID NO: 3762 - DNA, 51 bp, synthetic construct
  source 1..51: mol_type = other DNA
agcgcggcgcgcgagcgtggcgaaggtttccagcaggccgtggccgcgcat

SEQ ID NO: 3763 - DNA, 51 bp, synthetic construct
  source 1..51: mol_type = other DNA
gcgaaagaagccttagaacaggcgcgccaaaatgtggagaaaacggcggaa

SEQ ID NO: 3764 - DNA, 51 bp, synthetic construct
  source 1..51: mol_type = other DNA
atgctggcgtactctgaaatgattgcggagaaggtgcgtacggcggcccgt

SEQ ID NO: 3765 - DNA, 51 bp, synthetic construct
  source 1..51: mol_type = other DNA
catgaatatcacgccgaaaccattaagaacgtgcgtacggcgacggaaagc

SEQ ID NO: 3766 - DNA, 51 bp, synthetic construct
  source 1..51: mol_type = other DNA
cgtgaaaccgttcgcgtgatggcggaagtttctgcgctggaggcgacggcg

SEQ ID NO: 3767 - DNA, 51 bp, synthetic construct
  source 1..51: mol_type = other DNA
accaccgaattaacgatgattgcgaatcgcatccgtgaattaatggaagcg

SEQ ID NO: 3768 - DNA, 51 bp, synthetic construct
  source 1..51: mol_type = other DNA
cgtggcaaagttgagcgtagcattaagatcgtggatgagtatttaagcgcg

SEQ ID NO: 3769 - DNA, 51 bp, synthetic construct
  source 1..51: mol_type = other DNA
gcgaaagaaatcgcccagctggtgcaagactatacccaacataacggccgt

SEQ ID NO: 3770 - DNA, 51 bp, synthetic construct
  source 1..51: mol_type = other DNA
ggcccggatggtgacgcggtggtgtctttagcgaaagagtattctaaaacc

SEQ ID NO: 3771 - DNA, 51 bp, synthetic construct
  source 1..51: mol_type = other DNA
gtggcggcgttaatcgcggaacgtgagcgcgtgaccacgagcttaaatgat

SEQ ID NO: 3772 - DNA, 51 bp, synthetic construct
  source 1..51: mol_type = other DNA
ctgcatctggttgacctggcgcgtttcgccgtgaccgagcataacaaaaaa

SEQ ID NO: 3773 - DNA, 51 bp, synthetic construct
  source 1..51: mol_type = other DNA
agcgcggcgcgcgagcgtggcgaaggtttcaaacaggccattgaggcgcat

SEQ ID NO: 3774 - DNA, 51 bp, synthetic construct
  source 1..51: mol_type = other DNA
cgtgaacaggttgttgtgcgtctgttagacatgctgaccaaggcggccagc

SEQ ID NO: 3775 - DNA, 51 bp, synthetic construct
  source 1..51: mol_type = other DNA
caggcggtggttcaaaaaagcctggccgccattgcggacgattctaaaaaa

SEQ ID NO: 3776 - DNA, 51 bp, synthetic construct
  source 1..51: mol_type = other DNA
atggatgaacgcaaccgtcagattgccgagattggcgccagcttaattaaa

SEQ ID NO: 3777 - DNA, 51 bp, synthetic construct
  source 1..51: mol_type = other DNA
cgtcatgtggactacgtggcggatcaaatcgtgaccaagctggttgatgtg

SEQ ID NO: 3778 - DNA, 51 bp, synthetic construct
  source 1..51: mol_type = other DNA
gcggtggatcaacgccgtgcggcgcgcacgggcatggcgttcgaaatgctg

SEQ ID NO: 3779 - DNA, 51 bp, synthetic construct
  source 1..51: mol_type = other DNA
gcggtgctggacgactggctgaaacagaagggtctgaaaaaccaggccctg

SEQ ID NO: 3780 - DNA, 51 bp, synthetic construct
  source 1..51: mol_type = other DNA
cagcagctggttacggatattattcacttagcgcgtgttgcgcgcgatagc

SEQ ID NO: 3781 - DNA, 51 bp, synthetic construct
  source 1..51: mol_type = other DNA
aatgcggtgtctttagtgatgcgtcgtatccgcaaagaaaacgtggacgcg

SEQ ID NO: 3782 - DNA, 51 bp, synthetic construct
  source 1..51: mol_type = other DNA
cgtgaactgacggagaaagcgttttctttagtgaaattagcgttacgtgat

SEQ ID NO: 3783 - DNA, 51 bp, synthetic construct
  source 1..51: mol_type = other DNA
aaagatagcttaggtgaaaccgcgttcaacatgctgctggaccgtatcgtg

SEQ ID NO: 3784 - DNA, 51 bp, synthetic construct
  source 1..51: mol_type = other DNA
ctggaaaaaaacttccaggcggcgaagaacatgattgaacgcgcgggtgaa

SEQ ID NO: 3785 - DNA, 51 bp, synthetic construct
  source 1..51: mol_type = other DNA
gcgaatctgacggccacctatcgtaagttagaagaaatggccaaacaagtg

SEQ ID NO: 3786 - DNA, 51 bp, synthetic construct
  source 1..51: mol_type = other DNA
gatagcggcatcaagcgtattgcggaggccgcgtggcaggttaatgagagc

SEQ ID NO: 3787 - DNA, 51 bp, synthetic construct
  source 1..51: mol_type = other DNA
gcggcggaacgcggtcgtgtgctgatgcgcttaagcgcgcgcgtgacggat

SEQ ID NO: 3788 - DNA, 51 bp, synthetic construct
  source 1..51: mol_type = other DNA
aaaccgcagttagacaaagtgctgggtttcgtggcgcaagcgaagaaagaa

SEQ ID NO: 3789 - DNA, 51 bp, synthetic construct
  source 1..51: mol_type = other DNA
gataaagatcgcgccaatctgattaacaacatttttgagctggccggcctg

SEQ ID NO: 3790 - DNA, 51 bp, synthetic construct
  source 1..51: mol_type = other DNA
ccgctggcgatccacgcgctgctggagcgcatgaatgaacaaaaagccaaa

SEQ ID NO: 3791 - DNA, 51 bp, synthetic construct
  source 1..51: mol_type = other DNA
cagtgggtgaaggacgcgatgcagcatttagaccgtcaggccgcggccctg

SEQ ID NO: 3792 - DNA, 51 bp, synthetic construct
  source 1..51: mol_type = other DNA
gcgcgtcatcgcgagctggcggcgggtatcgaagcgtgggccacccaacat

SEQ ID NO: 3793 - DNA, 51 bp, synthetic construct
  source 1..51: mol_type = other DNA
agcaccaatgagtctgtgaaaaatttattactggaacgcgtgaaggaaagc

SEQ ID NO: 3794 - DNA, 51 bp, synthetic construct
  source 1..51: mol_type = other DNA
cgtaataatatgcaacacgtggcgggcatcacggaagcggccaaagagacc

SEQ ID NO: 3795 - DNA, 51 bp, synthetic construct
  source 1..51: mol_type = other DNA
gaagaacatttcaaggtgctggtgaagatgacggcgcaggagctggccaat

SEQ ID NO: 3796 - DNA, 51 bp, synthetic construct
  source 1..51: mol_type = other DNA
agcgcggaacgcatccgtcagctgaagacggtgctgggtaaaatgcaagaa

SEQ ID NO: 3797 - DNA, 51 bp, synthetic construct
  source 1..51: mol_type = other DNA
gaaaccctgaagttagaaaccgcgaaggccattctgcacggcttccagacc

SEQ ID NO: 3798 - DNA, 51 bp, synthetic construct
  source 1..51: mol_type = other DNA
ctgagcctgttaatgaagaatgcggatacggccatgtatcatgccaaagaa

SEQ ID NO: 3799 - DNA, 51 bp, synthetic construct
  source 1..51: mol_type = other DNA
tatgcggatgttgagctgaatagccgcaaggtggcggccggcttacataaa

SEQ ID NO: 3800 - DNA, 51 bp, synthetic construct
  source 1..51: mol_type = other DNA
gaaaccgatgagtaccagctgctgcaagttaaaaaattaattgccctgagc

SEQ ID NO: 3801 - DNA, 51 bp, synthetic construct
  source 1..51: mol_type = other DNA
gtggtgctggccgagaaagcgcagcaaatcgcgaaaatcctggttaaagaa

SEQ ID NO: 3802 - DNA, 51 bp, synthetic construct
  source 1..51: mol_type = other DNA
gaaagcctggttatggccggcgatctggttatcaaaaccgccaaaaagcat

SEQ ID NO: 3803 - DNA, 51 bp, synthetic construct
  source 1..51: mol_type = other DNA
aaagaaggcgtttacggcctggcgcgcacgctgctgcacctggcccaggaa

SEQ ID NO: 3804 - DNA, 51 bp, synthetic construct
  source 1..51: mol_type = other DNA
gtgcaggatcgcgccgcgctgattcacaagattgcggacggcatccaggcg

SEQ ID NO: 3805 - DNA, 51 bp, synthetic construct
  source 1..51: mol_type = other DNA
gaagcgagcatcgccattagccaggcccgcctggatgagaaaatcgcgcag

SEQ ID NO: 3806 - DNA, 51 bp, synthetic construct
  source 1..51: mol_type = other DNA
aaagaacagaaggccgaactggtgttaaacgcgctggttgcgatccgttat

SEQ ID NO: 3807 - DNA, 51 bp, synthetic construct
  source 1..51: mol_type = other DNA
ccgctggaagagaagaccattcgtgccgttgcgcgtgcccatcacgaaacc

SEQ ID NO: 3808 - DNA, 51 bp, synthetic construct
  source 1..51: mol_type = other DNA
gcggatatgcgttctcaacgtgcgcagttagccaaaggcgtttttgaccgt

SEQ ID NO: 3809 - DNA, 51 bp, synthetic construct
  source 1..51: mol_type = other DNA
accgatctgcgcatcgcgtttattgccgaggtgcgtaaggtggccaatgaa

SEQ ID NO: 3810 - DNA, 51 bp, synthetic construct
  source 1..51: mol_type = other DNA
ggcaaacaggcctctgaagtgtttgccgttctgattaacaaagacaaagcg

SEQ ID NO: 3811 - DNA, 51 bp, synthetic construct
  source 1..51: mol_type = other DNA
aatcaggtgttaaacaaagtgaaagccgacaaaagcttagaagccaataat

SEQ ID NO: 3812 - DNA, 51 bp, synthetic construct
  source 1..51: mol_type = other DNA
ctggcgcaggttcgcgaagaagtgacggccaaatatgccgaattaaaagcg

SEQ ID NO: 3813 - DNA, 51 bp, synthetic construct
  source 1..51: mol_type = other DNA
gtggaagaaaagacggaactgtttaacgttgtggtgtctctgatccgtgcg

SEQ ID NO: 3814 - DNA, 51 bp, synthetic construct
  source 1..51: mol_type = other DNA
atggatgaattaaaccgtcagattgccgagattggcgccagcttaattaaa

SEQ ID NO: 3815 - DNA, 51 bp, synthetic construct
  source 1..51: mol_type = other DNA
catgaatatcaccaaaccaccattaacaacgtgcgtcaagcggccgcggaa

SEQ ID NO: 3816 - DNA, 51 bp, synthetic construct
  source 1..51: mol_type = other DNA
ggcgaacgtatcaagaaaattgtgaacgacattctgggtggcaagaatgcg

SEQ ID NO: 3817 - DNA, 51 bp, synthetic construct
  source 1..51: mol_type = other DNA
ctggaaccgttcttagcgcagatgaaagccttagatgatttaattaagagc

SEQ ID NO: 3818 - DNA, 51 bp, synthetic construct
  source 1..51: mol_type = other DNA
atgaaacagacggagagccatgcggttaagattgtggttgaagccgcgcgt

SEQ ID NO: 3819 - DNA, 51 bp, synthetic construct
  source 1..51: mol_type = other DNA
gattttattacgtctaaactgctgtctggtgcggaagacgcgttactgcgt

SEQ ID NO: 3820 - DNA, 51 bp, synthetic construct
  source 1..51: mol_type = other DNA
accgatctgcgcttagcgtttaccgccttaattcgtgaggcgttaaataaa

SEQ ID NO: 3821 - DNA, 51 bp, synthetic construct
  source 1..51: mol_type = other DNA
ccgaaagtgatcaaccgtctggcgcacgaggtgattgaggcgcaacaggcg

SEQ ID NO: 3822 - DNA, 51 bp, synthetic construct
  source 1..51: mol_type = other DNA
tttgaaaccaacgttcgtgaaacccgccgcgtggtggaggcggcccatgcg

SEQ ID NO: 3823 - DNA, 51 bp, synthetic construct
  source 1..51: mol_type = other DNA
gaagaactggccatccagaatgcgcgcttagcgatttctattgcccgtaaa

SEQ ID NO: 3824 - DNA, 51 bp, synthetic construct
  source 1..51: mol_type = other DNA
gaacagggcaaccgcgaagcgcgtcaagccggccagttactgaaggaagcg

SEQ ID NO: 3825 - DNA, 51 bp, synthetic construct
  source 1..51: mol_type = other DNA
ggcaccaaagttacgaaaatggaagatgacatcaaaaaattactgggtcgt

SEQ ID NO: 3826 - DNA, 51 bp, synthetic construct
  source 1..51: mol_type = other DNA
cagcgtgcgaagaaggcgattgatttagcctttgaatctgcgaagagcctg

SEQ ID NO: 3827 - DNA, 51 bp, synthetic construct
  source 1..51: mol_type = other DNA
aaagaaagccaagttcgtaccgcgaagatcctgaatgttctgaaggaaacc

SEQ ID NO: 3828 - DNA, 51 bp, synthetic construct
  source 1..51: mol_type = other DNA
ccgctggaagccgttcgtatgcagaatttaatcgcgcgtgaggcggaggcg

SEQ ID NO: 3829 - DNA, 51 bp, synthetic construct
  source 1..51: mol_type = other DNA
gcgcgtgatatcgacacctgggcgaatgttacggcgcgttctattcgcgcg

SEQ ID NO: 3830 - DNA, 51 bp, synthetic construct
  source 1..51: mol_type = other DNA
gtggtgaccgacgttcgtgattttttagccgcgcgtgcccaggccctgcgt

SEQ ID NO: 3831 - DNA, 51 bp, synthetic construct
  source 1..51: mol_type = other DNA
gcggaaaaagcccaagcgattgcggccgcccgtaatacgtttgcccgtgat

SEQ ID NO: 3832 - DNA, 51 bp, synthetic construct
  source 1..51: mol_type = other DNA
ggcgcgacccacgagattcagcgtatgatcggtcgtgcgatgcgcaccgcg

SEQ ID NO: 3833 - DNA, 51 bp, synthetic construct
  source 1..51: mol_type = other DNA
accgaagcgtctatcgcgaaagcgaagcgcctgattaagctgtacaatgat

SEQ ID NO: 3834 - DNA, 51 bp, synthetic construct
  source 1..51: mol_type = other DNA
gtggaagcggttcgccatatgcgtctgatgaacgaggcgattgcccagctg

SEQ ID NO: 3835 - DNA, 51 bp, synthetic construct
  source 1..51: mol_type = other DNA
aaaaccgataacttaaaaattggcaaggactatctggaggatgttattaat

SEQ ID NO: 3836 - DNA, 51 bp, synthetic construct
  source 1..51: mol_type = other DNA
gcggtgaccgccaagctggatgaatctttaaccaaagttattgactttatt

SEQ ID NO: 3837 - DNA, 51 bp, synthetic construct
  source 1..51: mol_type = other DNA
gatcgtgaaaaggccctggaactggccatggcccagattgacaaaaacttt

SEQ ID NO: 3838 - DNA, 51 bp, synthetic construct
  source 1..51: mol_type = other DNA
aatgaactgggtcgcattaataaaatcatcgcggaagttgcggagaaattt

SEQ ID NO: 3839 - DNA, 51 bp, synthetic construct
  source 1..51: mol_type = other DNA
gtggatgtgttcaagaccaaagcgcaaccactgattaagcatatcctgacc

SEQ ID NO: 3840 - DNA, 51 bp, synthetic construct
  source 1..51: mol_type = other DNA
ctgagcgcggcccaaaccctgcgtgccgcctttattaaggcggagaaagaa

SEQ ID NO: 3841 - DNA, 51 bp, synthetic construct
  source 1..51: mol_type = other DNA
ctggatgatttagagaaagcgcgtacggttctggaaaaccgtatcaatgcg

SEQ ID NO: 3842 - DNA, 51 bp, synthetic construct
  source 1..51: mol_type = other DNA
gcgggcgaacaagccattcgtcagatcttagatgaagccggcaaggtgggc

SEQ ID NO: 3843 - DNA, 51 bp, synthetic construct
  source 1..51: mol_type = other DNA
ggcctgcagcgcgccaaaaccggcacggacaaaaccttagtgaaggaagtg

SEQ ID NO: 3844 - DNA, 51 bp, synthetic construct
  source 1..51: mol_type = other DNA
ggcacccagttagagaaactgatggaaaacatgcgcaatgatatcgcgagc

SEQ ID NO: 3845 - DNA, 51 bp, synthetic construct
  source 1..51: mol_type = other DNA
gatagcattcgcttactggcgctgttatctctgggcgaggtgggtcatcat

SEQ ID NO: 3846 - DNA, 51 bp, synthetic construct
  source 1..51: mol_type = other DNA
attccgagcatctctattatgctgcatgagttaattaaattactgcaccat

SEQ ID NO: 3847 - DNA, 51 bp, synthetic construct
  source 1..51: mol_type = other DNA
ctggatgatgttaaggcgctgcattctaagctgacctctgtgttcgcgacc

SEQ ID NO: 3848 - DNA, 51 bp, synthetic construct
  source 1..51: mol_type = other DNA
agcaaagaatctggtgtgattcagggtgacctgattgccaaacactggcag

SEQ ID NO: 3849 - DNA, 51 bp, synthetic construct
  source 1..51: mol_type = other DNA
acctatgcgcgcgccgaaaaagcgttagttgatattgttcgtcacagccag

SEQ ID NO: 3850 - DNA, 51 bp, synthetic construct
  source 1..51: mol_type = other DNA
accaatgaacgcatcgcgcagcgtgccttagaaggcttcacccgcagcctg

SEQ ID NO: 3851 - DNA, 51 bp, synthetic construct
  source 1..51: mol_type = other DNA
gcgctgcagaaggagcaggcgaaattatctctggaatcttgggcggacgtg

SEQ ID NO: 3852 - DNA, 51 bp, synthetic construct
  source 1..51: mol_type = other DNA
gtggtggatcgcttcctggcggatttacaagatgcggttgcgcaagtgcgt

SEQ ID NO: 3853 - DNA, 51 bp, synthetic construct
  source 1..51: mol_type = other DNA
cgtgaagaattaggtcgtcatagctgggccgttctgcatacgctggccgcg

SEQ ID NO: 3854 - DNA, 51 bp, synthetic construct
  source 1..51: mol_type = other DNA
ctgccgaccgccaaggatgaactgacgaaggcgctggacctgttaaatagc

SEQ ID NO: 3855 - DNA, 51 bp, synthetic construct
  source 1..51: mol_type = other DNA
cgtctggaattaaaggcgctggaagttgccgcgcgtacgagcatcctgacc

SEQ ID NO: 3856 - DNA, 51 bp, synthetic construct
  source 1..51: mol_type = other DNA
gcgagcgaacgcggtcagctgatttacaagctggcggacctgatcgaacgt

SEQ ID NO: 3857 - DNA, 51 bp, synthetic construct
  source 1..51: mol_type = other DNA
gcgagccatcgcggtcgtctgctgaaccgcctggcggacctgatcgaacgt

SEQ ID NO: 3858 - DNA, 51 bp, synthetic construct
  source 1..51: mol_type = other DNA
gatgcgggcgttttagatgcgtatacgcaccataccgagcgtttaaaaagc

SEQ ID NO: 3859 - DNA, 51 bp, synthetic construct
  source 1..51: mol_type = other DNA
ggcgaaagccgcgttattagcgtggccgaggtgaaaggtctggttgaacag

SEQ ID NO: 3860 - DNA, 51 bp, synthetic construct
  source 1..51: mol_type = other DNA
aaagaagaagccttagaactgattaacggttatattcaaaaaatcaaaagc

SEQ ID NO: 3861 - DNA, 51 bp, synthetic construct
  source 1..51: mol_type = other DNA
gataaaggccaaaagattgcgcagcaaatcaaaagcatcattgacattatg

SEQ ID NO: 3862 - DNA, 51 bp, synthetic construct
  source 1..51: mol_type = other DNA
tatattgaattagaccgtctgagcacgaacctggcgacgcgtttagcggaa

SEQ ID NO: 3863 - DNA, 51 bp, synthetic construct
  source 1..51: mol_type = other DNA
ccggaagtggccgccgaagtgattaaggacctggtgaacaccgttcgtagc

SEQ ID NO: 3864 - DNA, 51 bp, synthetic construct
  source 1..51: mol_type = other DNA
tgggaagatacggacgcgctgctgcgccaactggcgaacgcggttaaagcg

SEQ ID NO: 3865 - DNA, 51 bp, synthetic construct
  source 1..51: mol_type = other DNA
attgaagcggccacgcatgtgggcaagcaaattgtggagaaaatcctgaaa

SEQ ID NO: 3866 - DNA, 51 bp, synthetic construct
  source 1..51: mol_type = other DNA
gatgaaaccatcgagctgctgctgaactctgtgaaagccgcgttcggcaaa

SEQ ID NO: 3867 - DNA, 51 bp, synthetic construct
  source 1..51: mol_type = other DNA
caggcggatcgcaaggcggaaaaaatcatctttaatgagctgtctaaagcg

SEQ ID NO: 3868 - DNA, 51 bp, synthetic construct
  source 1..51: mol_type = other DNA
accgaagcggccgccgaacagggcgccaagctgctggccaaattccgtcag

SEQ ID NO: 3869 - DNA, 51 bp, synthetic construct
  source 1..51: mol_type = other DNA
attaaagaatctatcaaagaactggttgaggaactgtctatgtttgccaaa

SEQ ID NO: 3870 - DNA, 51 bp, synthetic construct
  source 1..51: mol_type = other DNA
agccgtctgtctggtgcgctgaatcgcgccgaaggcttaatggaagagctg

SEQ ID NO: 3871 - DNA, 51 bp, synthetic construct
  source 1..51: mol_type = other DNA
ctggaaaatttagccgatggctataagcacatgagcctggccctgaaccgt

SEQ ID NO: 3872 - DNA, 51 bp, synthetic construct
  source 1..51: mol_type = other DNA
gcgcgtgaaatggccaacgcgaaagaaatcgcccgtaccgttcagatcatg

SEQ ID NO: 3873 - DNA, 51 bp, synthetic construct
  source 1..51: mol_type = other DNA
gcggaaaaaatcgaccgttgggtgattttaaacagcattaagctgttagcg

SEQ ID NO: 3874 - DNA, 51 bp, synthetic construct
  source 1..51: mol_type = other DNA
gcgcatgtgaagtctcatggcgcgaaggttctggcgtctttttctgaaggc

SEQ ID NO: 3875 - DNA, 51 bp, synthetic construct
  source 1..51: mol_type = other DNA
agcgcggcgatccaccgtctggtggacacgagcgaaaagctgtctaaaaaa

SEQ ID NO: 3876 - DNA, 51 bp, synthetic construct
  source 1..51: mol_type = other DNA
cgtagcgaacgcgccgaagcgaatttaaagctgctgttaaatgcctttgaa

SEQ ID NO: 3877 - DNA, 51 bp, synthetic construct
  source 1..51: mol_type = other DNA
acccgtgaagccgttgcgaaactgacggccgcgcgtttagcggccgatgtg

SEQ ID NO: 3878 - DNA, 51 bp, synthetic construct
  source 1..51: mol_type = other DNA
catgaatatcaccaaaccaccattaacaacctgcgtgccgcggccaccgaa

SEQ ID NO: 3879 - DNA, 51 bp, synthetic construct
  source 1..51: mol_type = other DNA
gatgtgagcttagagctgctgaccaagggtcgtagcttagcgaacgaactg

SEQ ID NO: 3880 - DNA, 51 bp, synthetic construct
  source 1..51: mol_type = other DNA
caggaagaagccttagaactgattaacggttatattcaaaaaatcaaaagc

SEQ ID NO: 3881 - DNA, 51 bp, synthetic construct
  source 1..51: mol_type = other DNA
ccggataaaaactacagcaaagcggagaagctgattaaggaagccagcaaa

SEQ ID NO: 3882 - DNA, 51 bp, synthetic construct
  source 1..51: mol_type = other DNA
gataatgatcgcgcctttaccattaagaagctggcggagctggttaaagaa

SEQ ID NO: 3883 - DNA, 51 bp, synthetic construct
  source 1..51: mol_type = other DNA
ctgaccaaattcggtgaactgctgaacgccagccatgccagcttaaaagat

SEQ ID NO: 3884 - DNA, 51 bp, synthetic construct
  source 1..51: mol_type = other DNA
gcgaatgataagaacgcgtttattttaaacaaaattaaggtgatccatggc

SEQ ID NO: 3885 - DNA, 51 bp, synthetic construct
  source 1..51: mol_type = other DNA
gtggatgaagccatgtcttttgcggaagttttaaaacaggttaaatctctg

SEQ ID NO: 3886 - DNA, 51 bp, synthetic construct
  source 1..51: mol_type = other DNA
ctggtggaaaagaacctgaaaattttcaagggcattgttagcgaggtgatg

SEQ ID NO: 3887 - DNA, 51 bp, synthetic construct
  source 1..51: mol_type = other DNA
gtgaaaagcgcccgcattgcgcgtaacacgcagattatcattcaagaagaa

SEQ ID NO: 3888 - DNA, 51 bp, synthetic construct
  source 1..51: mol_type = other DNA
attgatgaagccttagcgtttgcggagatcctgaaacaaattaagagcatg

SEQ ID NO: 3889 - DNA, 51 bp, synthetic construct
  source 1..51: mol_type = other DNA
cagacccgtatcaaggaactggtgaaggttgcgcaggaggtgggtgcggcg

SEQ ID NO: 3890 - DNA, 51 bp, synthetic construct
  source 1..51: mol_type = other DNA
gcgcaggtgaaggacgcgctgaccaagatgcgcgcggcggccctggacgcg

SEQ ID NO: 3891 - DNA, 51 bp, synthetic construct
  source 1..51: mol_type = other DNA
gcgaaagcgttaaaggcggtgcaggacaagctgaaagcctttgttgaaagc

SEQ ID NO: 3892 - DNA, 51 bp, synthetic construct
  source 1..51: mol_type = other DNA
cgtgatcgtgcccaagcggtggaaacgtacctgaaaaagctgatcgcgacc

SEQ ID NO: 3893 - DNA, 51 bp, synthetic construct
  source 1..51: mol_type = other DNA
attccggaattaacgaatctgaaaaacgccctggaagccaaatctaaagaa

SEQ ID NO: 3894 - DNA, 51 bp, synthetic construct
  source 1..51: mol_type = other DNA
ccgaaagtgggtcgcgaagcgattacgtctattattgacaccttagaaacc

SEQ ID NO: 3895 - DNA, 51 bp, synthetic construct
  source 1..51: mol_type = other DNA
aaagaaagcggtatcattcagggcgacttaattgcgaagcattgggccgcg

SEQ ID NO: 3896 - DNA, 51 bp, synthetic construct
  source 1..51: mol_type = other DNA
gtgaccgtgaagcgcaatagcgcgaacgttattgcgcacgaaatcgcgcat

SEQ ID NO: 3897 - DNA, 51 bp, synthetic construct
  source 1..51: mol_type = other DNA
cgtaccgaagccgccaatgtggaaaagatcaccaccaagctgttaaaagcg

SEQ ID NO: 3898 - DNA, 51 bp, synthetic construct
  source 1..51: mol_type = other DNA
accgcgcgtgttgagaccgtgattggtatcgcggatacgtttttaaaacgt

SEQ ID NO: 3899 - DNA, 51 bp, synthetic construct
  source 1..51: mol_type = other DNA
cgtgaagaagccatcagcaatatggtggttgccctgaaagagctgtctatt

SEQ ID NO: 3900 - DNA, 51 bp, synthetic construct
  source 1..51: mol_type = other DNA
aaaaaaattgccgaggatgtgaaaacggccggcgcgacgattatcaaaaat

SEQ ID NO: 3901 - DNA, 51 bp, synthetic construct
  source 1..51: mol_type = other DNA
attgcggcgcaaaagaatgatgatgaccgccaggcgcgcgcgttagcggcg

SEQ ID NO: 3902 - DNA, 51 bp, synthetic construct
  source 1..51: mol_type = other DNA
gaagatgtgcaattaaccctgcgtaacatggccctggaagcctttaaggcg

SEQ ID NO: 3903 - DNA, 51 bp, synthetic construct
  source 1..51: mol_type = other DNA
agcgatagccgcatggccatgaccggcgcgatccgcaaagtgttcgtggaa

SEQ ID NO: 3904 - DNA, 51 bp, synthetic construct
  source 1..51: mol_type = other DNA
aaagatgcgtctgagatgattaaaaaagccgttgaaatgaccatcagcagc

SEQ ID NO: 3905 - DNA, 51 bp, synthetic construct
  source 1..51: mol_type = other DNA
aaaggcccgaaggttcgtacctggctgtctgagaatggcgaggaacgcctg

SEQ ID NO: 3906 - DNA, 51 bp, synthetic construct
  source 1..51: mol_type = other DNA
ccggataccttcaaggaactgaaacaaggtgcgcatgccctgaagctggcg

SEQ ID NO: 3907 - DNA, 51 bp, synthetic construct
  source 1..51: mol_type = other DNA
ccggaactgttagcccatggccgtcaaaagattctggacctgttaaatgaa

SEQ ID NO: 3908 - DNA, 51 bp, synthetic construct
  source 1..51: mol_type = other DNA
ctggaaaccgttcgcaaagcgaccaagtctgcgctggagaaagccgtggaa

SEQ ID NO: 3909 - DNA, 51 bp, synthetic construct
  source 1..51: mol_type = other DNA
cagaatattcgcttaaccagcgaaacgcaactgaaaaagctgtctaatgat

SEQ ID NO: 3910 - DNA, 51 bp, synthetic construct
  source 1..51: mol_type = other DNA
agcgaaaccgttgaccgtgcgttttctcaaatgaaagcggccattcgcgcg

SEQ ID NO: 3911 - DNA, 51 bp, synthetic construct
  source 1..51: mol_type = other DNA
gaaaaaattgttaagatgaataccgatgccgttgatcaggccgtgacgagc

SEQ ID NO: 3912 - DNA, 51 bp, synthetic construct
  source 1..51: mol_type = other DNA
gatgcgggccgcgaggcgctggatttagccgcggcgtctattcgcagcggc

SEQ ID NO: 3913 - DNA, 51 bp, synthetic construct
  source 1..51: mol_type = other DNA
ccgaaaatgatggcggacggtattgataaaacgttagaagtggccctgacc

SEQ ID NO: 3914 - DNA, 51 bp, synthetic construct
  source 1..51: mol_type = other DNA
cgtgcggcgcgcgagctgcaggcggacgccctggaacaactgggttatcag

SEQ ID NO: 3915 - DNA, 51 bp, synthetic construct
  source 1..51: mol_type = other DNA
aaaaccgtgaaggacctgaccaaattattatatgaaacggcgttactgacc

SEQ ID NO: 3916 - DNA, 51 bp, synthetic construct
  source 1..51: mol_type = other DNA
ggcaccgaagccaacgaagcggcgatcaagattgcgcgcaaatacggcaaa

SEQ ID NO: 3917 - DNA, 51 bp, synthetic construct
  source 1..51: mol_type = other DNA
ctgaaagtgcaattaattgataaattaggtgaagtggactttcgcctgacc

SEQ ID NO: 3918 - DNA, 51 bp, synthetic construct
  source 1..51: mol_type = other DNA
gaaaaacgtcaaggtgcgctggaattaatcaaaaaaggttatacgcagcag

SEQ ID NO: 3919 - DNA, 51 bp, synthetic construct
  source 1..51: mol_type = other DNA
ccggaagcggccgacaaatttaaagagatcaataatgcccatgccattctg

SEQ ID NO: 3920 - DNA, 51 bp, synthetic construct
  source 1..51: mol_type = other DNA
aaagaactggccgagaaagcgctgcaagccgtggaaatcgcgcgcgatacc

SEQ ID NO: 3921 - DNA, 51 bp, synthetic construct
  source 1..51: mol_type = other DNA
cgtaaacagcacgttgcgggcctgaaggccctgcaggactgggcgcaaaat

SEQ ID NO: 3922 - DNA, 51 bp, synthetic construct
  source 1..51: mol_type = other DNA
aaagcggcggttgaccgtgcgctgcaacaagtgacctctaccaaggatgcg

SEQ ID NO: 3923 - DNA, 51 bp, synthetic construct
  source 1..51: mol_type = other DNA
aaagcggatgttgacaatgcgctgaacgccgtgacccgcgcgaaggcggcg

SEQ ID NO: 3924 - DNA, 51 bp, synthetic construct
  source 1..51: mol_type = other DNA
ctggatatttctttacatgtgctgttagagacctttatcaaaggtctgcgt

SEQ ID NO: 3925 - DNA, 51 bp, synthetic construct
  source 1..51: mol_type = other DNA
gaagtgtatggtgagaaaattgtgaaggttcaggaattagcgatcaaaacc

SEQ ID NO: 3926 - DNA, 51 bp, synthetic construct
  source 1..51: mol_type = other DNA
cgtgcggaacgcgccggcgaagcgacgcgcagcctgatcgataagattacc

SEQ ID NO: 3927 - DNA, 51 bp, synthetic construct
  source 1..51: mol_type = other DNA
aaacatgcggccgagcgtctgcagcaagccctggcgcaagcggccgaacgt

SEQ ID NO: 3928 - DNA, 51 bp, synthetic construct
  source 1..51: mol_type = other DNA
gaacagtatacggagaatctgaaagttatcgtggcggagaaattagcgggc

SEQ ID NO: 3929 - DNA, 51 bp, synthetic construct
  source 1..51: mol_type = other DNA
cgtgcggaagccgaggcggaagtgcaacgcagcgtggagcgtttcaaagcg

SEQ ID NO: 3930 - DNA, 51 bp, synthetic construct
  source 1..51: mol_type = other DNA
aatgcggataagcaagtgaccagcatcttaaaaaaagccggcgacctgctg

SEQ ID NO: 3931 - DNA, 51 bp, synthetic construct
  source 1..51: mol_type = other DNA
caggaaacccaaaagggcgcgctgaaggagattcaggcctttatccgtagc

SEQ ID NO: 3932 - DNA, 51 bp, synthetic construct
  source 1..51: mol_type = other DNA
gtggaaaccacgcgcaaaattattacgaacctgaccgagggcgccagccgt

SEQ ID NO: 3933 - DNA, 51 bp, synthetic construct
  source 1..51: mol_type = other DNA
aaagatggcgagacgaaaattctgaaggagaccgtggaggaattaaaaaaa

SEQ ID NO: 3934 - DNA, 51 bp, synthetic construct
  source 1..51: mol_type = other DNA
aaagatgtggagaaggtgattcgtgccgccgcgattgccaataaggaaacc

SEQ ID NO: 3935 - DNA, 51 bp, synthetic construct
  source 1..51: mol_type = other DNA
ggctggcgtgccgccgaaaccaatgttgccaaaagcgaggcggagaaacgt

SEQ ID NO: 3936 - DNA, 51 bp, synthetic construct
  source 1..51: mol_type = other DNA
cgtctgattgacgcccataatcaggccgttgattttgccgtgcgccaggtg

SEQ ID NO: 3937 - DNA, 51 bp, synthetic construct
  source 1..51: mol_type = other DNA
gatgaaacccgccgcgaaatgggcaatgccgccgtgcgtgccgcgaaggcg

SEQ ID NO: 3938 - DNA, 51 bp, synthetic construct
  source 1..51: mol_type = other DNA
gtgaatgatttaatcaaagaaaatgttaagatggcggtgaagaatgttgtg

SEQ ID NO: 3939 - DNA, 51 bp, synthetic construct
  source 1..51: mol_type = other DNA
gaacaggatttcgccgtgctgaccgccgagattacctctaaaatcgcgcgt

SEQ ID NO: 3940 - DNA, 51 bp, synthetic construct
  source 1..51: mol_type = other DNA
aatcaggcggtttctattctggtggccaaggtggaagagattttcaaagat

SEQ ID NO: 3941 - DNA, 51 bp, synthetic construct
  source 1..51: mol_type = other DNA
atgggcgcgttaacggcgctgattcgcgaccagaaagcccgtgttgaagcg

SEQ ID NO: 3942 - DNA, 51 bp, synthetic construct
  source 1..51: mol_type = other DNA
agccgtgcggacgccgcggtgaccgacgacgcgcgtggtctgttagcggcg

SEQ ID NO: 3943 - DNA, 51 bp, synthetic construct
  source 1..51: mol_type = other DNA
ggcgaagaaaagtctcgtgcgctggccgttctgaaagccgcgttaaatagc

SEQ ID NO: 3944 - DNA, 51 bp, synthetic construct
  source 1..51: mol_type = other DNA
ctggcggcgcaaaagaccctggtggacggtattcgtaaggaagttgcggcg

SEQ ID NO: 3945 - DNA, 51 bp, synthetic construct
  source 1..51: mol_type = other DNA
catgaatttacgaagctggtgaaagagttagaaggcgttattacgaaagcg

SEQ ID NO: 3946 - DNA, 51 bp, synthetic construct
  source 1..51: mol_type = other DNA
gtggaagcggccttagataatctgatgatcaaggtgtatgagattacgaaa

SEQ ID NO: 3947 - DNA, 51 bp, synthetic construct
  source 1..51: mol_type = other DNA
gatggcaaacgcttagaaaatctggttcgcggcattttcgcgggtaatatt

SEQ ID NO: 3948 - DNA, 51 bp, synthetic construct
  source 1..51: mol_type = other DNA
ctgcaggcgacgatcgcgggcaaattagacaaactgcgcgatgcccagcgt

SEQ ID NO: 3949 - DNA, 51 bp, synthetic construct
  source 1..51: mol_type = other DNA
aaaaaagatgccgagattagcgcgggtcgcaccgcgttactggccattcag

SEQ ID NO: 3950 - DNA, 51 bp, synthetic construct
  source 1..51: mol_type = other DNA
gcggatgtgttaaagaaaaccattaagaacaccctggacattcacaaaagc

SEQ ID NO: 3951 - DNA, 51 bp, synthetic construct
  source 1..51: mol_type = other DNA
ctgaatctgaagcaagcgaaagaagaggccattaaagagctggttgatgcg

SEQ ID NO: 3952 - DNA, 51 bp, synthetic construct
  source 1..51: mol_type = other DNA
gaaacccatgccaacaaaattgtgcgcgcctatgaattagcgttaaaagtg

SEQ ID NO: 3953 - DNA, 51 bp, synthetic construct
  source 1..51: mol_type = other DNA
catgaactgttagacgaaagcgcgaagaagattgtggaggtggccaaaagc

SEQ ID NO: 3954 - DNA, 51 bp, synthetic construct
  source 1..51: mol_type = other DNA
catatggcgtctaagcgtgataaaatcgccgatattcaagaagccctggcg

SEQ ID NO: 3955 - DNA, 51 bp, synthetic construct
  source 1..51: mol_type = other DNA
gatgatctgcaacgcgcgattgcgttatctctggcggagagcaaccgtgcg

SEQ ID NO: 3956 - DNA, 51 bp, synthetic construct
  source 1..51: mol_type = other DNA
gatagcaccgccgccgtggcggtgttaaagcgtgcggttgaattagatgcg

SEQ ID NO: 3957 - DNA, 51 bp, synthetic construct
  source 1..51: mol_type = other DNA
gaacagaccgccgaccagatttttaagttaagccatttactgaagctgacc

SEQ ID NO: 3958 - DNA, 51 bp, synthetic construct
  source 1..51: mol_type = other DNA
attaccgtggaccgcctggtgagcaaggccctgaatatgtggggtaaagaa

SEQ ID NO: 3959 - DNA, 51 bp, synthetic construct
  source 1..51: mol_type = other DNA
agcattgattacgccgcggaaattgccaaggatatgattaagaaagccaat

SEQ ID NO: 3960 - DNA, 51 bp, synthetic construct
  source 1..51: mol_type = other DNA
attggcgaacgcgttgtgcgtgcgcacttaagcgtgtgggacgatgttagc

SEQ ID NO: 3961 - DNA, 51 bp, synthetic construct
  source 1..51: mol_type = other DNA
ccgagcctggccgagcatgcgctgaaggccctggatcgcattatggcccag

SEQ ID NO: 3962 - DNA, 51 bp, synthetic construct
  source 1..51: mol_type = other DNA
aaaggccgtgacatcctgaccaaaacgatcattctggccctgcgcgaagtg

SEQ ID NO: 3963 - DNA, 51 bp, synthetic construct
  source 1..51: mol_type = other DNA
gcgcgtgatgttgacaataccattaagttagcgaaagccctgttagaagaa

SEQ ID NO: 3964 - DNA, 51 bp, synthetic construct
  source 1..51: mol_type = other DNA
aatgcggcgttagccaaatttgaaacgatccgtgcgcacggcgccctgcgt

SEQ ID NO: 3965 - DNA, 51 bp, synthetic construct
  source 1..51: mol_type = other DNA
catattaccgttgaccgtctggtgtctaaggcgctgaacatgtggggcaaa

SEQ ID NO: 3966 - DNA, 51 bp, synthetic construct
  source 1..51: mol_type = other DNA
gaagatatggaaaagcgcgcgaatgaagttgccaatctgttaaaaacgctg

SEQ ID NO: 3967 - DNA, 51 bp, synthetic construct
  source 1..51: mol_type = other DNA
gatgtgcagatccaaaaagataatttagttaaagatgccattcgcgcgaat

SEQ ID NO: 3968 - DNA, 51 bp, synthetic construct
  source 1..51: mol_type = other DNA
aaaggcaccttcgccattgcgaaagccatgggtcgtggcacgcatgagcat

SEQ ID NO: 3969 - DNA, 51 bp, synthetic construct
  source 1..51: mol_type = other DNA
cgtgaacgtgttttagaagcggcgcaaggtctgcgtcaagcgttactggcg

SEQ ID NO: 3970 - DNA, 51 bp, synthetic construct
  source 1..51: mol_type = other DNA
aaaaaagcggaggccgtggcgaccgttgttgcggcggttgatcaagcgcgt

SEQ ID NO: 3971 - DNA, 51 bp, synthetic construct
  source 1..51: mol_type = other DNA
ggcggcggcacggacctgggcaaattcgttctggcgaagaaagaggaaaat

SEQ ID NO: 3972 - DNA, 51 bp, synthetic construct
  source 1..51: mol_type = other DNA
aatgatcagttaaagaccgtggtgggtgagtttaccgccctgttagataaa

SEQ ID NO: 3973 - DNA, 51 bp, synthetic construct
  source 1..51: mol_type = other DNA
ctggataaaaactacagcaaagcggagaagctgattaaggaagccagcaaa

SEQ ID NO: 3974 - DNA, 51 bp, synthetic construct
  source 1..51: mol_type = other DNA
catcatgcggttgagcagattcgtgccaagattagcacggcgatctttcag

SEQ ID NO: 3975 - DNA, 51 bp, synthetic construct
  source 1..51: mol_type = other DNA
gatcagcgtcgcttagatctggtgcacacggcggcgttaatgctggacaaa

SEQ ID NO: 3976 - DNA, 51 bp, synthetic construct
  source 1..51: mol_type = other DNA
gcgaaagaaaagtctaaatttgaagacatggccaaaagcgacaaagcccgt

SEQ ID NO: 3977 - DNA, 51 bp, synthetic construct
  source 1..51: mol_type = other DNA
aaactgggcgagacggaacaggaaggtatcgcgggccgcatgattcgcaat

SEQ ID NO: 3978 - DNA, 51 bp, synthetic construct
  source 1..51: mol_type = other DNA
aaagatgaagtttaccagattctggagaagggcgcggccaaacgcaccacc

SEQ ID NO: 3979 - DNA, 51 bp, synthetic construct
  source 1..51: mol_type = other DNA
attccgggcatcgttgaagattatcgccaagcggcgcaacgtgccaaacgt

SEQ ID NO: 3980 - DNA, 51 bp, synthetic construct
  source 1..51: mol_type = other DNA
ccgaccctggttaacgaaattgcgaaggagattgtgaactatttaaaaaaa

SEQ ID NO: 3981 - DNA, 51 bp, synthetic construct
  source 1..51: mol_type = other DNA
cagcgtgcgcgcgccgtgctggatcgcgccgcggaattagcgacgattgcg

SEQ ID NO: 3982 - DNA, 51 bp, synthetic construct
  source 1..51: mol_type = other DNA
gcggaagcggagaagcgtattcaggaggccgcggtgacgatttacaaagcg

SEQ ID NO: 3983 - DNA, 51 bp, synthetic construct
  source 1..51: mol_type = other DNA
ccgcgtgcgaagaaggtgctggaattatctctgcgtgaggcgttacagctg

SEQ ID NO: 3984 - DNA, 51 bp, synthetic construct
  source 1..51: mol_type = other DNA
tttattcagcgcacggcgcatgatcgcatcctgccggccctgatcagcaaa

SEQ ID NO: 3985 - DNA, 51 bp, synthetic construct
  source 1..51: mol_type = other DNA
catcgtctgatcgaccaggcgaccgccgagattgtggagaccgccaaacgt

SEQ ID NO: 3986 - DNA, 51 bp, synthetic construct
  source 1..51: mol_type = other DNA
tggccgcgtgttcgccgtgatattgccaacctgggccaagcggccgaagcg

SEQ ID NO: 3987 - DNA, 51 bp, synthetic construct
  source 1..51: mol_type = other DNA
ccgcgtctgttaggtgaaaccgcgggtttaaaacaggttgaagccgatacc

SEQ ID NO: 3988 - DNA, 51 bp, synthetic construct
  source 1..51: mol_type = other DNA
gaaaaaaccttcaacctggcgatggcgttaaaggtggaatctattttaaaa

SEQ ID NO: 3989 - DNA, 51 bp, synthetic construct
  source 1..51: mol_type = other DNA
tatggcgtggcccgccagctgaaagagtctcaggataagagcatcgataat

SEQ ID NO: 3990 - DNA, 51 bp, synthetic construct
  source 1..51: mol_type = other DNA
gaagcgacccgcgccaaaatgcgtgcggcctctgaacgtttaggctctctg

SEQ ID NO: 3991 - DNA, 51 bp, synthetic construct
  source 1..51: mol_type = other DNA
accgcgcataagaacgcggtgaccttacgcgtgaatgccctgaaggaacag

SEQ ID NO: 3992 - DNA, 51 bp, synthetic construct
  source 1..51: mol_type = other DNA
cagctggcggttgagaaaggcaatttagagaataaaaagagcatcaccgaa

SEQ ID NO: 3993 - DNA, 51 bp, synthetic construct
  source 1..51: mol_type = other DNA
tatccgctgttagttaaaattctggactctctgggcgagcgtaaggtgacc

SEQ ID NO: 3994 - DNA, 51 bp, synthetic construct; identical to SEQ ID NO: 1326
  source 1..51: mol_type = other DNA

SEQ ID NO: 3995 - DNA, 51 bp, synthetic construct
  source 1..51: mol_type = other DNA
accgcggcgaagaacgcggcgctggaggccgtggcgcgcgcgatcgaacgt

SEQ ID NO: 3996 - DNA, 51 bp, synthetic construct
  source 1..51: mol_type = other DNA
ccggaaaccttacgccaggtgacccaacacgcggaacacgtggttaatgcg

SEQ ID NO: 3997 - DNA, 51 bp, synthetic construct
  source 1..51: mol_type = other DNA
ggcgcgcatcgcgccacctatctgcgcgccattgcggccaaaatcaccgaa

SEQ ID NO: 3998 - DNA, 51 bp, synthetic construct; identical to SEQ ID NO: 1183
  source 1..51: mol_type = other DNA

SEQ ID NO: 3999 - DNA, 51 bp, synthetic construct
  source 1..51: mol_type = other DNA
gcggaagcggccaaggcggaaattgttgccagctttgagcgtgccaaaaat

SEQ ID NO: 4000 - DNA, 51 bp, synthetic construct
  source 1..51: mol_type = other DNA
accgaagtggacatccaggcgagcatggcctacgcgaaagccctggagaaa

SEQ ID NO: 4001 - DNA, 51 bp, synthetic construct
  source 1..51: mol_type = other DNA
catagcagcaagaacgatattcatacgttactgatggatttaaattcttat

SEQ ID NO: 4002 - DNA, 51 bp, synthetic construct
  source 1..51: mol_type = other DNA
attagcagcatcacggatggcctgaagacgaaaattgttgcggagcgtctg

SEQ ID NO: 4003 - DNA, 51 bp, synthetic construct
  source 1..51: mol_type = other DNA
agcgatattcgcgacattgtgcagtctgcccatatgcgtgttgtgaaggaa

SEQ ID NO: 4004 - DNA, 51 bp, synthetic construct
  source 1..51: mol_type = other DNA
tttcgtcaggcccacaccgcgagcggtaaggcggtgcacctggccgaaacc

SEQ ID NO: 4005 - DNA, 51 bp, synthetic construct
  source 1..51: mol_type = other DNA
catagcagcaagaacgatattcatacgttactgaaagacctgaacagctat

SEQ ID NO: 4006 - DNA, 51 bp, synthetic construct
  source 1..51: mol_type = other DNA
ctggcggtggagttaaaacagagcacggcccaggcgcacgaaaaggcggaa

SEQ ID NO: 4007 - DNA, 51 bp, synthetic construct
  source 1..51: mol_type = other DNA
gaactggaagccgaggcgacccatcgcgttattaccatcgcgaaccgtacc

SEQ ID NO: 4008 - DNA, 51 bp, synthetic construct
  source 1..51: mol_type = other DNA
agcgaagtggacatccaggcgagcatcgcctatgcgaaggcgttagaaaaa

SEQ ID NO: 4009 - DNA, 51 bp, synthetic construct
  source 1..51: mol_type = other DNA
aaaattctggaggccagcgtgattatctggcgcgtgattgacgatacggcg

SEQ ID NO: 4010 - DNA, 51 bp, synthetic construct
  source 1..51: mol_type = other DNA
cgtggccagcgccaaatggaagtgctgtctgccattattgacaaatctaaa

SEQ ID NO: 4011 - DNA, 51 bp, synthetic construct
  source 1..51: mol_type = other DNA
catgaaaaattaacgcaggcgcgtaaccaactgctggccgaagccgcgaaa

SEQ ID NO: 4012 - DNA, 51 bp, synthetic construct
  source 1..51: mol_type = other DNA
ccggaagtgcaccgcctgacccatgccttacgtgcggccacccgcattgtg

SEQ ID NO: 4013 - DNA, 51 bp, synthetic construct
  source 1..51: mol_type = other DNA
aaagatgcgcgcgccctgcaggcggacgccatggaacagttaggctaccag

SEQ ID NO: 4014 - DNA, 51 bp, synthetic construct
  source 1..51: mol_type = other DNA
cagcgtcatgttgagcgtgcggcgcgcgccgcggtgcaagcgttacagctg

SEQ ID NO: 4015 - DNA, 51 bp, synthetic construct
  source 1..51: mol_type = other DNA
gtggaagatacggttgaagcgctgggtaagattcgtaacgcgatcgcgcgt

SEQ ID NO: 4016 - DNA, 51 bp, synthetic construct
  source 1..51: mol_type = other DNA
aatgaagcggccgacctggtgattaagtctatggaaaaaacgattgccagc

SEQ ID NO: 4017 - DNA, 51 bp, synthetic construct
  source 1..51: mol_type = other DNA
gcgaccgatcaaaaggtggaaaaaatgttaatcagcagcatcaaagagaaa

SEQ ID NO: 4018 - DNA, 51 bp, synthetic construct
  source 1..51: mol_type = other DNA
gcggatgatacgttagcgctggcgcgcgcccgtggcgaggcgatgtctgcg

SEQ ID NO: 4019 - DNA, 51 bp, synthetic construct
  source 1..51: mol_type = other DNA
cgtgaagtgtctttaaccagcggccgcttagtgctgcaaggcttacgtgat

SEQ ID NO: 4020 - DNA, 51 bp, synthetic construct
  source 1..51: mol_type = other DNA
ccggatgtgcgcgagatgaatggcgtgttaaagggcatgctgtctgaatgg

SEQ ID NO: 4021 - DNA, 51 bp, synthetic construct
  source 1..51: mol_type = other DNA
gtggaagaagccgttcgtattgtgaaggaggtgattcaaaaattagcgaat

SEQ ID NO: 4022 - DNA, 51 bp, synthetic construct
  source 1..51: mol_type = other DNA
ctgattaaacaagccgaagcgaaaaaggagctggaagtttttttagatacc

SEQ ID NO: 4023 - DNA, 51 bp, synthetic construct
  source 1..51: mol_type = other DNA
gtgaatctgatccgcgaacgtggccaattcattggcgaggaagttaaagcg

SEQ ID NO: 4024 - DNA, 51 bp, synthetic construct
  source 1..51: mol_type = other DNA
ctggatgaatctttaaaaattgtgaaggagtatctgatcgcggccaccgcg

SEQ ID NO: 4025 - DNA, 51 bp, synthetic construct
  source 1..51: mol_type = other DNA
gcgaaagtgttagcccatggcgaaaaggttctgacctcttttggtgaaggc

SEQ ID NO: 4026 - DNA, 51 bp, synthetic construct
  source 1..51: mol_type = other DNA
cgttatgaacgccaaaaaattctgttagccaccgcggaggcgttagcggcg

SEQ ID NO: 4027 - DNA, 51 bp, synthetic construct
  source 1..51: mol_type = other DNA
ccgaccatttctttaaaaaccgtgaagttaatgaaagaaggtctggaggcg

SEQ ID NO: 4028 - DNA, 51 bp, synthetic construct
  source 1..51: mol_type = other DNA
accaaagaaaagatcgcgattaccgagaacgcgctggccgtggcccatcag

SEQ ID NO: 4029 - DNA, 51 bp, synthetic construct
  source 1..51: mol_type = other DNA
ggcgtgccggcctctaaaaccattgccgagcgtgatttaaaagccatggat

SEQ ID NO: 4030 - DNA, 51 bp, synthetic construct
  source 1..51: mol_type = other DNA
acctatctgaagcacgatagcgtgttaaagaccattcgcggcttagtggaa

SEQ ID NO: 4031 - DNA, 51 bp, synthetic construct
  source 1..51: mol_type = other DNA
gcggaagtggccgagaccaaagtggccatggttaataaatacgcgcgcgaa

SEQ ID NO: 4032 - DNA, 51 bp, synthetic construct
  source 1..51: mol_type = other DNA
gatgcgctggttcgcgatgcgcagcaagccgcggcgcgcattgccgatagc

SEQ ID NO: 4033 - DNA, 51 bp, synthetic construct
  source 1..51: mol_type = other DNA
gataccatggcggactcttatggcaaagttatgggtcgtgatggtcgtgcg

SEQ ID NO: 4034 - DNA, 51 bp, synthetic construct
  source 1..51: mol_type = other DNA
ccgggcctggttaaggaaaccaaacgcgccctgaatcgcgcgttagaaacc

SEQ ID NO: 4035 - DNA, 51 bp, synthetic construct
  source 1..51: mol_type = other DNA
tatctgaaagaggccctgcgtctggcccaagaagcgttaaatcgcctgggc

SEQ ID NO: 4036 - DNA, 51 bp, synthetic construct
  source 1..51: mol_type = other DNA
catagcgtgtggcaacgcatgggcgatgaattattagcgaaagccgcggaa

SEQ ID NO: 4037 - DNA, 51 bp, synthetic construct
  source 1..51: mol_type = other DNA
gcggatgaaatcaagaatgtgtggaaagaggaggtgagccgcctggttggc

SEQ ID NO: 4038 - DNA, 51 bp, synthetic construct
  source 1..51: mol_type = other DNA
gaagcggcggttacgcgtagcgcggagcgcattgtgggtcagatggagaaa

SEQ ID NO: 4039 - DNA, 51 bp, synthetic construct
  source 1..51: mol_type = other DNA
gaagcgcagcgcacggcgctgtatacgaaggcggaacaacagttagataaa

SEQ ID NO: 4040 - DNA, 51 bp, synthetic construct
  source 1..51: mol_type = other DNA
ctggaagatcgcgccgcgaccctgtctaagattattcaagtggccgtggaa

SEQ ID NO: 4041 - DNA, 51 bp, synthetic construct
  source 1..51: mol_type = other DNA
gaaaccggcatcaaggaagcgaaattaggtggcgaacgcctgaagagccgt

SEQ ID NO: 4042 - DNA, 51 bp, synthetic construct
  source 1..51: mol_type = other DNA
cagcagcagttagaccgtgcgattgaggcctttggccaagtgggtaaaaaa

SEQ ID NO: 4043 - DNA, 51 bp, synthetic construct
  source 1..51: mol_type = other DNA
ccggcggcggccgacgcgaccattgccgaggcggtgaagagcgcccgtaaa

SEQ ID NO: 4044 - DNA, 51 bp, synthetic construct
  source 1..51: mol_type = other DNA
gaagaaaatttaaagcaggcgcgtgccgccctggaacgcctgtacaccgcg

SEQ ID NO: 4045 - DNA, 51 bp, synthetic construct
  source 1..51: mol_type = other DNA
ccggaagtgacggttgaagcgattaagcgcctgagcgacctgttcgcgcgt

SEQ ID NO: 4046 - DNA, 51 bp, synthetic construct
  source 1..51: mol_type = other DNA
agccatgatgcccgcaaagaacataagcaatttgtggccgaattaaaagcg

SEQ ID NO: 4047 - DNA, 51 bp, synthetic construct
  source 1..51: mol_type = other DNA
gcggcgcagcgcgcccgtgtggaaacggaggcgctgaagtatttacgtgcg

SEQ ID NO: 4048 - DNA, 51 bp, synthetic construct
  source 1..51: mol_type = other DNA
ccgctgaccgttaagaaacatctgcgcgcccaggcgatcgcgttagaaaat

SEQ ID NO: 4049 - DNA, 51 bp, synthetic construct
  source 1..51: mol_type = other DNA
accgatgcggttaagaaaattgcggaggccgcgtttcgcgtgaacgaaaaa

SEQ ID NO: 4050 - DNA, 51 bp, synthetic construct
  source 1..51: mol_type = other DNA
ctggaaaattctaagctgaatcagaaggttattgatgccatttaccgtgcg

SEQ ID NO: 4051 - DNA, 51 bp, synthetic construct
  source 1..51: mol_type = other DNA
ctgaccgaattaaacagcctgatttctcgcctggcggacgatacgaaaacc

SEQ ID NO: 4052 - DNA, 51 bp, synthetic construct
  source 1..51: mol_type = other DNA
attaatgatggtttacgtattgcgcgcaagctgctgttagatatcaatgat

SEQ ID NO: 4053 - DNA, 51 bp, synthetic construct
  source 1..51: mol_type = other DNA
aatgaagcgtctaaggcgctgacctctgcccgttttgttctgtctgataaa

SEQ ID NO: 4054 - DNA, 51 bp, synthetic construct
  source 1..51: mol_type = other DNA
gcggtgagcgagcgcggcgcggcggaggccctgaccgccattcgccgtggc

SEQ ID NO: 4055 - DNA, 51 bp, synthetic construct
  source 1..51: mol_type = other DNA
cgtaccggcgttttcattgcgctggaccacctgacccaacatatcaatgat

SEQ ID NO: 4056 - DNA, 51 bp, synthetic construct
  source 1..51: mol_type = other DNA
ctgcatgaaaagttatttctgctggccatcgtgcgttctctgaagattagc

SEQ ID NO: 4057 - DNA, 51 bp, synthetic construct
  source 1..51: mol_type = other DNA
aaagatacctctaagaaagtgcagatggcccgcctggcgtgggaggcgagc

SEQ ID NO: 4058 - DNA, 51 bp, synthetic construct
  source 1..51: mol_type = other DNA
ggcctgcagaaggagcaggcgaaattatctctggaatcttgggcggacgtg

SEQ ID NO: 4059 - DNA, 51 bp, synthetic construct
  source 1..51: mol_type = other DNA
ctgaccaaaaacttaaaagtggtgaaggagctgatttctgaagccattcag

SEQ ID NO: 4060 - DNA, 51 bp, synthetic construct
  source 1..51: mol_type = other DNA
gatgcgaccacggccgcgcgtgcggcccgcctggcggccgtggccgaagat

SEQ ID NO: 4061 - DNA, 51 bp, synthetic construct
  source 1..51: mol_type = other DNA
gaagcgcatgccgagaaagtgcattcttacgtgaccgccggcatcaccagc

SEQ ID NO: 4062 - DNA, 54 bp, synthetic construct
  source 1..54: mol_type = other DNA
cagctggtggcccgcctggaaggcgaggttatgctgagcgccctggcccgtaaa

SEQ ID NO: 4063 - DNA, 54 bp, synthetic construct
  source 1..54: mol_type = other DNA
accgcgcgtgttgaggaagcgcagcaagccgcggtgcgcattgccgataccctg

SEQ ID NO: 4064 - DNA, 54 bp, synthetic construct
  source 1..54: mol_type = other DNA
ccgcgtagcgttggtaaagcgagcgagcaactggcgggtaaagttgcggaagtg

SEQ ID NO: 4065 - DNA, 54 bp, synthetic construct
  source 1..54: mol_type = other DNA
gaagcggatatccacgaaggcatgcagcgcttcgcgcaggccgtgggtaaagtg

SEQ ID NO: 4066 - DNA, 54 bp, synthetic construct
  source 1..54: mol_type = other DNA
ccgaaactggttcgcgcggcggtggaggcccatagcaaggcgttagatagcgcg

SEQ ID NO: 4067 - DNA, 54 bp, synthetic construct
  source 1..54: mol_type = other DNA
ctggaaaccgttcgcaaagcgaccaagtctgcgctggagaaagccgtggaactg

SEQ ID NO: 4068 - DNA, 54 bp, synthetic construct
  source 1..54: mol_type = other DNA
agcctggaaacggttcgtaaagcgacgaagagcgcgttagaaaaggcggtggaa

SEQ ID NO: 4069 - DNA, 54 bp, synthetic construct
  source 1..54: mol_type = other DNA
gaacgttttaacgccgcgctgcatgagtctgcgcatacggtgatcgcgcaggtg

SEQ ID NO: 4070 - DNA, 54 bp, synthetic construct
  source 1..54: mol_type = other DNA
agcgaagtggacatccagggcagcatggcctacgcgaaagccctggagaaagcg

SEQ ID NO: 4071 - DNA, 54 bp, synthetic construct
  source 1..54: mol_type = other DNA
cgtgcggcggccgccgaaattgcggttaagaccgtgtctgaattcattacccgt

SEQ ID NO: 4072 - DNA, 54 bp, synthetic construct
  source 1..54: mol_type = other DNA
attgcggcgggtcaaaatgaactgttaaagcgtgcgaaggcgaacggcgatgcg

SEQ ID NO: 4073 - DNA, 54 bp, synthetic construct
  source 1..54: mol_type = other DNA
gatgcgggccgcaagaattttgcgaagacggcggtgaagctgttacaggatctg

SEQ ID NO: 4074 - DNA, 54 bp, synthetic construct
  source 1..54: mol_type = other DNA
gaaatggcgttcaagattgcgggctctatggccattaaagaggcggttcagaaa

SEQ ID NO: 4075 - DNA, 54 bp, synthetic construct
  source 1..54: mol_type = other DNA
gcgcgtgaattagccgaactgggcatgaagatcaccgcggccgcgaacgaacag

SEQ ID NO: 4076 - DNA, 54 bp, synthetic construct
  source 1..54: mol_type = other DNA
gaaaaaaccatgttagttctggcgctgttattagcgaaaaaggtggccagccat

SEQ ID NO: 4077 - DNA, 54 bp, synthetic construct
  source 1..54: mol_type = other DNA
gcggatgcgcaaaagcgtgaagtggccgcctttctggcccagacgagccatgaa

SEQ ID NO: 4078 - DNA, 54 bp, synthetic construct
  source 1..54: mol_type = other DNA
attgcgcataacttagcgcaggtgcgcgacaaaatttctgcggccgcgacccgt

SEQ ID NO: 4079 - DNA, 54 bp, synthetic construct
  source 1..54: mol_type = other DNA
ggcgatccgatcgagattaatggcttaaaggcggcgttcaaagagctgagcaat

SEQ ID NO: 4080 - DNA, 54 bp, synthetic construct
  source 1..54: mol_type = other DNA
ctgccgggccgcatcgtgcaggatcaaaagaatgcgcgcgcgcacgcggtgacc

SEQ ID NO: 4081 - DNA, 54 bp, synthetic construct
  source 1..54: mol_type = other DNA
gaatttgatttattaggccaggcggccgccagcaaattagcgcgcgatctgacc

SEQ ID NO: 4082 - DNA, 54 bp, synthetic construct
  source 1..54: mol_type = other DNA
accgatgaaggtttaaaagaagcgacgaagctgacccaaagcgttaaaaaactg

SEQ ID NO: 4083 - DNA, 54 bp, synthetic construct
  source 1..54: mol_type = other DNA
gatgcggaattagcccagagcatttctatgacgcgtgcggaggcgaaggcggcg

SEQ ID NO: 4084 - DNA, 54 bp, synthetic construct
  source 1..54: mol_type = other DNA
ggcagcgcgttcgagagcgcgatggtgaaccacgtgaccaaggtggccgatcat

SEQ ID NO: 4085 - DNA, 54 bp, synthetic construct
  source 1..54: mol_type = other DNA
gcgaaagtgaaggcccatggcaaaaaggttattgattctttttctgaaggcctg

SEQ ID NO: 4086 - DNA, 54 bp, synthetic construct
  source 1..54: mol_type = other DNA
agcaaagaatctggtattattcagggtgacctgattgccaaacactgggcggcg

SEQ ID NO: 4087 - DNA, 54 bp, synthetic construct
  source 1..54: mol_type = other DNA
gcggaacaggcccaacaggtgcatgccttcctgcgtggtcgtttagcggcgaaa

SEQ ID NO: 4088 - DNA, 54 bp, synthetic construct
  source 1..54: mol_type = other DNA
gcggatctgaagggtcagctggcgcaacgcattgtggacgatgttagcgtggcg

SEQ ID NO: 4089 - DNA, 54 bp, synthetic construct
  source 1..54: mol_type = other DNA
agcgaaagcttagttaaaaccctgatctctgaatttgccgcggttgcggaaaaa

SEQ ID NO: 4090 - DNA, 54 bp, synthetic construct
  source 1..54: mol_type = other DNA
tttcgtcaggcccacaccgcgagcggtaaggcggtgcacctggccgaaaccaaa

SEQ ID NO: 4091 - DNA, 54 bp, synthetic construct
  source 1..54: mol_type = other DNA
attcagagcaaggttgcgctgaaaacgttcgcggcggccgatcaacgtgaagcg

SEQ ID NO: 4092 - DNA, 54 bp, synthetic construct
  source 1..54: mol_type = other DNA
gataatgtgatgacggccgaaatgcgtaaaatcgccatggcggcggttctggat

SEQ ID NO: 4093 - DNA, 54 bp, synthetic construct
  source 1..54: mol_type = other DNA
attagctatatcatccgtaaagcggactctgtgaataaggcgttagatagcgcg

SEQ ID NO: 4094 - DNA, 54 bp, synthetic construct
  source 1..54: mol_type = other DNA
gtgagcaaaatgttagccagctttgaaaagatcattaccgagaccgttgcgaaa

SEQ ID NO: 4095 - DNA, 54 bp, synthetic construct
  source 1..54: mol_type = other DNA
gcggcggaagttaacacccgtgtggccaaggtggtgcaagatgccgcgaataaa

SEQ ID NO: 4096 - DNA, 54 bp, synthetic construct
  source 1..54: mol_type = other DNA
aataaagaacaagccaaagcgcgtgaggccattggcaacggcttaaccatgctg

SEQ ID NO: 4097 - DNA, 54 bp, synthetic construct
  source 1..54: mol_type = other DNA
ccgatgattgccaagcatggcaccacgatcctgcatggtctggaccgtgcggtg

SEQ ID NO: 4098 - DNA, 54 bp, synthetic construct
  source 1..54: mol_type = other DNA
gaaaaaattttaaacgatgtgagccaagccaaagcgcaacatttaaaagcggcg

SEQ ID NO: 4099 - DNA, 54 bp, synthetic construct
  source 1..54: mol_type = other DNA
gtggtggcggaggttaaagcgtttttagaggcgcaggcccgtcgcgcgctgagc

SEQ ID NO: 4100 - DNA, 54 bp, synthetic construct
  source 1..54: mol_type = other DNA
ccgattgcgatcgccgaagtgcgtgaggccctgacccgcaccttagcgaccgaa

SEQ ID NO: 4101 - DNA, 54 bp, synthetic construct
  source 1..54: mol_type = other DNA
gcgggcgcggccacggaagaatttatcaagcgtgcggaggtgaacggcctggcg

SEQ ID NO: 4102 - DNA, 54 bp, synthetic construct
  source 1..54: mol_type = other DNA
gcgaaagatgccggtctgtttattggttctattgtgcaagaaatcgcggaacgt

SEQ ID NO: 4103 - DNA, 54 bp, synthetic construct
  source 1..54: mol_type = other DNA
tatgatattgccatggagattgtgaatggtgttgatcgtgttattaaggcgagc

SEQ ID NO: 4104 - DNA, 54 bp, synthetic construct
  source 1..54: mol_type = other DNA
gatgcggcgacgatcaaagcgctgttatctcatgcgcacgaagcccagcgtagc

SEQ ID NO: 4105 - DNA, 54 bp, synthetic construct
  source 1..54: mol_type = other DNA
aaaaatgaacaattagcgattgcgcacggtattcagaagattatcgcggaaaat

SEQ ID NO: 4106 - DNA, 54 bp, synthetic construct
  source 1..54: mol_type = other DNA
ctggcggcgcaaaagaccctggtggacggtattcgtaaggaagttgcggcggaa

SEQ ID NO: 4107 - DNA, 54 bp, synthetic construct
  source 1..54: mol_type = other DNA
aaagcggcgttcttaaaagcgaccgacgagctgattgccgcggttaccgcgcat

SEQ ID NO: 4108 - DNA, 54 bp, synthetic construct
  source 1..54: mol_type = other DNA
gcggaagcgcgcggtaatcgtatggcggaccaagcggcgcgcgaagccgcgatg

SEQ ID NO: 4109 - DNA, 54 bp, synthetic construct
  source 1..54: mol_type = other DNA
ggcgcgcaggccttaaaagcggtgttagagcatggcccaaccttacgtcagcgt

SEQ ID NO: 4110 - DNA, 54 bp, synthetic construct
  source 1..54: mol_type = other DNA
aaagtgggcaacatcattgataccatgatcacggatgcgttcctgaaggcggat

SEQ ID NO: 4111 - DNA, 54 bp, synthetic construct
  source 1..54: mol_type = other DNA
ggcggcgcgaaggccagcgatgatgcccgcaccctggccgaagtttttaccaaa

SEQ ID NO: 4112 - DNA, 54 bp, synthetic construct
  source 1..54: mol_type = other DNA
cgtgcgaaagcctcttttgatacccgcgttgcggcggccgaattagcgctggcg

SEQ ID NO: 4113 - DNA, 54 bp, synthetic construct
  source 1..54: mol_type = other DNA
accgatcagttattagaacatgcgaaggagagcctgacgcatgccaaagcggcg

SEQ ID NO: 4114 - DNA, 54 bp, synthetic construct
  source 1..54: mol_type = other DNA
cgtgcggaagttgacctggtggtgcaagacctgaaacaagcggttgcgcagctg

SEQ ID NO: 4115 - DNA, 54 bp, synthetic construct
  source 1..54: mol_type = other DNA
ggcgcggatttagagaatctgctgaacgaggcggcgttactggccgcgcgtaaa

SEQ ID NO: 4116 - DNA, 54 bp, synthetic construct
  source 1..54: mol_type = other DNA
gcggatgtgcgcaagaatgcgaatgaggccgtgctgggtattatgatccatctg

SEQ ID NO: 4117 - DNA, 54 bp, synthetic construct
  source 1..54: mol_type = other DNA
attgcggcggccatcgaaaccacccgcacggtgctggccgcggcccgtgaacgt

SEQ ID NO: 4118 - DNA, 54 bp, synthetic construct
  source 1..54: mol_type = other DNA
gtggaagcggacgttaccattggcccatacctgaaagcccaggccgataaacag

SEQ ID NO: 4119 - DNA, 54 bp, synthetic construct
  source 1..54: mol_type = other DNA
accaaacagatcttagatgcgaaaggtccagaaggcgttgtggactgggtgaaa

SEQ ID NO: 4120 - DNA, 54 bp, synthetic construct
  source 1..54: mol_type = other DNA
ggcgcgcaggccttaaaagcggtgttagagcatggcccaaccttaaatgaacgt

SEQ ID NO: 4121 - DNA, 54 bp, synthetic construct
  source 1..54: mol_type = other DNA
cgtccggaagccgaggcggtgagcatgttagttaaagaagccgtggttaccttt

SEQ ID NO: 4122 - DNA, 54 bp, synthetic construct
  source 1..54: mol_type = other DNA
attgcggataaggccgaacaggtgatccaaaatattaagaatgttctggaagcg

SEQ ID NO: 4123 - DNA, 54 bp, synthetic construct
  source 1..54: mol_type = other DNA
ccgatggtgcgcgcccatggcaaaaaggttctgacctcttttggtgatgcggtg

SEQ ID NO: 4124 - DNA, 54 bp, synthetic construct
  source 1..54: mol_type = other DNA
agcaataaagaggccctggcgaaaggtatgttactgctgttcgcgcaccatctg

SEQ ID NO: 4125 - DNA, 54 bp, synthetic construct
  source 1..54: mol_type = other DNA
ccgctggaagccgttcgtatgcagaatttaatcgcgcgtgaggcggaggcggcg

SEQ ID NO: 4126 - DNA, 54 bp, synthetic construct
  source 1..54: mol_type = other DNA
gcgaccggcgacttagcgctgaaaaagttagaaaatgccattaagaaagtgcag

SEQ ID NO: 4127 - DNA, 54 bp, synthetic construct
  source 1..54: mol_type = other DNA
gtggaaacccgcaaggtgatggcggatttagttgtgggcaacctggaggcgcat

SEQ ID NO: 4128 - DNA, 54 bp, synthetic construct
  source 1..54: mol_type = other DNA
gcgcagacccgcgacggcattattgccggttttaaaaaggcgttagatgaaacc

SEQ ID NO: 4129 - DNA, 54 bp, synthetic construct
  source 1..54: mol_type = other DNA
aaagatctggcctctgcgctggaattattaaccggcttacgtaagaaaattgcg

SEQ ID NO: 4130 - DNA, 54 bp, synthetic construct
  source 1..54: mol_type = other DNA
cgtgcgcaggcccaaaaactggcgggtacggcgcatgacggcttagcgcgtgcg

SEQ ID NO: 4131 - DNA, 54 bp, synthetic construct
  source 1..54: mol_type = other DNA
ccgaccctggttaagcgtcaggcgacgacgattgcgaaggaattagcggaactg

SEQ ID NO: 4132 - DNA, 54 bp, synthetic construct
  source 1..54: mol_type = other DNA
gtggaaaaaaacttaaaaatttttaagggtattgtgtctgaagttatggcgagc

SEQ ID NO: 4133 - DNA, 54 bp, synthetic construct
  source 1..54: mol_type = other DNA
gaaaatgcggccaacaccgtggcgcacgcccgtaaagccattcacaaaattctg

SEQ ID NO: 4134 - DNA, 54 bp, synthetic construct
  source 1..54: mol_type = other DNA
gaagatctgaagaaggtgggcaatcgcgttctgaccgccctgggtggcattctg

SEQ ID NO: 4135 - DNA, 54 bp, synthetic construct
  source 1..54: mol_type = other DNA
gaagatctgaagaagcatggcgtgacgttcctgaccgccctgggtgcgattctg

SEQ ID NO: 4136 - DNA, 54 bp, synthetic construct
  source 1..54: mol_type = other DNA
gaagatctgaagaagcatggcgtgacggccctgaccgccctgggtgcgattctg

SEQ ID NO: 4137 - DNA, 54 bp, synthetic construct
  source 1..54: mol_type = other DNA
gtgcaggatatcaagaataatctgaaggaggcgattgagaccatcgtggcggcg

SEQ ID NO: 4138 - DNA, 54 bp, synthetic construct
  source 1..54: mol_type = other DNA
ggcgaaagccgcgttattagcgtggccgaggtgaaaggtctggttgaacagtgg

SEQ ID NO: 4139 - DNA, 54 bp, synthetic construct
  source 1..54: mol_type = other DNA
gcggcgcaggttaaggatgcgctgacgaagatgcgtgcggccgcgttagatgcg

SEQ ID NO: 4140 - DNA, 54 bp, synthetic construct
  source 1..54: mol_type = other DNA
gaagatctgaagaagcatggcgcgacggttctgaccgccctgggtggcattctg

SEQ ID NO: 4141 - DNA, 54 bp, synthetic construct
  source 1..54: mol_type = other DNA
caggtgaaaggtcacggcaaaaaagttgccgatgcgttaaccaacgcggtggcg

SEQ ID NO: 4142 - DNA, 54 bp, synthetic construct
  source 1..54: mol_type = other DNA
gtggtggatcgcttcctggcggatttacaagatgcggttgcgcaagtgcgtgcg

SEQ ID NO: 4143 - DNA, 54 bp, synthetic construct
  source 1..54: mol_type = other DNA
gaagatctgaagaaggatggcgtgacgtctctgaccgccctgggtgcgattctg

SEQ ID NO: 4144 - DNA, 54 bp, synthetic construct
  source 1..54: mol_type = other DNA
gcggatgaacaacgcagcgtgcgtgccttagtgaccgccaccacggcggtggat

SEQ ID NO: 4145 - DNA, 54 bp, synthetic construct
  source 1..54: mol_type = other DNA
gaagaagtgaagaagcatggcaccacggttctgaccgccctgggtcgtattctg

SEQ ID NO: 4146 - DNA, 54 bp, synthetic construct
  source 1..54: mol_type = other DNA
gtggatgaaggtgttgatctggtgatccgcgcgatttctgcggccaaacagcgt

SEQ ID NO: 4147 - DNA, 54 bp, synthetic construct
  source 1..54: mol_type = other DNA
gcggaaagcatcgccaaagcgcagaagtctcgtgaaatctttgagggcattgcg

SEQ ID NO: 4148 - DNA, 54 bp, synthetic construct
  source 1..54: mol_type = other DNA
gaagatctgaagaagcatggcgtgacggttctgaccgccctgggtgcgattctg

SEQ ID NO: 4149 - DNA, 54 bp, synthetic construct
  source 1..54: mol_type = other DNA
cgtgatgcgttaatcgaaaattataagacgagcattcgcaatgttggcgcggcg

SEQ ID NO: 4150 - DNA, 54 bp, synthetic construct
  source 1..54: mol_type = other DNA
accgaagaattagccgtggatgcgttatacaatgcgatcaaagttcgtctggcg

SEQ ID NO: 4151 - DNA, 54 bp, synthetic construct
  source 1..54: mol_type = other DNA
ccgggcaccggtgagattgtggcggaggccgtggatgccgcgatccgtaaaacc

SEQ ID NO: 4152 - DNA, 54 bp, synthetic construct
  source 1..54: mol_type = other DNA
ccggaaaccgccgccgataaactgttagccgcgattaacgaacgccgtgcgggc

SEQ ID NO: 4153 - DNA, 54 bp, synthetic construct
  source 1..54: mol_type = other DNA
ctgggcgcgtctggtgcgcgtattttaacgaccctggttcatgagatgcgtcgt

SEQ ID NO: 4154 - DNA, 54 bp, synthetic construct
  source 1..54: mol_type = other DNA
gaagatctgaagaagcatggcgtgacggttctgaccggtctgggtgcgattctg

SEQ ID NO: 4155 - DNA, 54 bp, synthetic construct
  source 1..54: mol_type = other DNA
tatgaaggcgagttaaataaagtgacgtctaatgtggccattggtcgtagccat

SEQ ID NO: 4156 - DNA, 54 bp, synthetic construct
  source 1..54: mol_type = other DNA
ggcgcgaccttaacgggcaccgtgcaagacattattcgcgaattagcgcgtcat

SEQ ID NO: 4157 - DNA, 54 bp, synthetic construct
  source 1..54: mol_type = other DNA
cgtgcgaaagcctcttttgatacccgcgttgcggcggccgaattagcgctgaat

SEQ ID NO: 4158 - DNA, 54 bp, synthetic construct
  source 1..54: mol_type = other DNA
ggcccggaagttatggacgcggcgattcgcgttctgaaaacggtgttagataat

SEQ ID NO: 4159 - DNA, 54 bp, synthetic construct
  source 1..54: mol_type = other DNA
cgtagcgaagccgacgatctggcgacgcgcgtggcgaacgcggttcgtgatgcg

SEQ ID NO: 4160 - DNA, 54 bp, synthetic construct
  source 1..54: mol_type = other DNA
ggcgcgacccaaaacctgccgaaattagccgaatttatccgtatcgcgaaagaa

SEQ ID NO: 4161 - DNA, 54 bp, synthetic construct
  source 1..54: mol_type = other DNA
gtggatggcgccgttcgtatgggccagcgcacggcggcggacattatcgcgcgt

SEQ ID NO: 4162 - DNA, 54 bp, synthetic construct
  source 1..54: mol_type = other DNA
catgcgcagatcacggaaaccgcgggtgccgtgaaacgcgcgatgcgcgatgcg

SEQ ID NO: 4163 - DNA, 54 bp, synthetic construct
  source 1..54: mol_type = other DNA
gcgaaagaattagttgatcgtagcgtttctctgagcaaggcggttaaagcgatt

SEQ ID NO: 4164 - DNA, 54 bp, synthetic construct
  source 1..54: mol_type = other DNA
gaagatctgaagaagcatggcaatacggttctgaccgccctgggtggcattctg

SEQ ID NO: 4165 - DNA, 54 bp, synthetic construct
  source 1..54: mol_type = other DNA
ccggaagcgttattaaaacgtgcggacgagggcgtgtaccaggccaaagcgagc

SEQ ID NO: 4166 - DNA, 54 bp, synthetic construct
  source 1..54: mol_type = other DNA
gaagtgtatcaaatcctggaaaaaggtgccgcgaaacgcaccacggcggcgacc

SEQ ID NO: 4167 - DNA, 54 bp, synthetic construct
  source 1..54: mol_type = other DNA
ctggatgaagttaacaaaaaagcgttccaaggcaccttactggcccatgtggat

SEQ ID NO: 4168 - DNA, 54 bp, synthetic construct
  source 1..54: mol_type = other DNA
ggcgataaaaaggccgcgctggtgtcttacattggcgagacccgccagcagctg

SEQ ID NO: 4169 - DNA, 54 bp, synthetic construct
  source 1..54: mol_type = other DNA
gaagatctgaagaagcatggcaccgttgttctgaccgccctgggtggcattctg

SEQ ID NO: 4170 - DNA, 54 bp, synthetic construct
  source 1..54: mol_type = other DNA
aaagaaagcttagttatggcgggcgatttagttattaaaacggcgaagaaacat

SEQ ID NO: 4171 - DNA, 54 bp, synthetic construct
  source 1..54: mol_type = other DNA
aatacctatgttaagggcgcgaatgccgccctggaaaagattgagaaacatctg

SEQ ID NO: 4172 - DNA, 54 bp, synthetic construct
  source 1..54: mol_type = other DNA
gaaagcgaaaaggttaatgaaattgttaaggcggtgaagaccgccctgaccggc

SEQ ID NO: 4173 - DNA, 54 bp, synthetic construct
  source 1..54: mol_type = other DNA
ggcgcgcaggccttacataccgtgttagacctggaaccagcgttaggcaaacgt

SEQ ID NO: 4174 - DNA, 54 bp, synthetic construct
  source 1..54: mol_type = other DNA
gatgaagataaggccgtggatctgatcgtttttaaaaaggcggttctgagcacc

SEQ ID NO: 4175 - DNA, 54 bp, synthetic construct
  source 1..54: mol_type = other DNA
gtgggcgcgacgggtggccgtatgctggccacgctggcgcgcgaattacatcgt

SEQ ID NO: 4176 - DNA, 54 bp, synthetic construct
  source 1..54: mol_type = other DNA
agcgaagtggacatccaggcgagcatcgcctatgcgaaggcgttagaaaaagcg

SEQ ID NO: 4177 - DNA, 54 bp, synthetic construct
  source 1..54: mol_type = other DNA
accgataccgccatcctgctgaaagacgccctggcggccgcgcacgcgcgttat

SEQ ID NO: 4178 - DNA, 54 bp, synthetic construct
  source 1..54: mol_type = other DNA
cgtgatctgttagagaccgcgggcaagttaatggcgaaagagagcatcgcgaaa

SEQ ID NO: 4179 - DNA, 57 bp, synthetic construct
  source 1..57: mol_type = other DNA
gaagatctgaagaagcagggcgtgacggttctgaccgccctgggtgcgattttaaaa

SEQ ID NO: 4180 - DNA, 57 bp, synthetic construct
  source 1..57: mol_type = other DNA
gcggcgcaggttaaggatgcgctgacgaagatgcgtgcggccgcgttagatgcgcag

SEQ ID NO: 4181 - DNA, 57 bp, synthetic construct
  source 1..57: mol_type = other DNA
accaaagcgggtgttctggcggatgccttagataaagccaccgagaaactgttaaat

SEQ ID NO: 4182 - DNA, 57 bp, synthetic construct
  source 1..57: mol_type = other DNA
gaagatctgaagaaggatggcgtgacggccctgaccgccctgggtgcgattttaaaa

SEQ ID NO: 4183 - DNA, 57 bp, synthetic construct
  source 1..57: mol_type = other DNA
gaagatctgaaggagcatggcaccgttgttctgaccgccctgggtggcattttaaaa

SEQ ID NO: 4184 - DNA, 57 bp, synthetic construct
  source 1..57: mol_type = other DNA
gaagatctgaagaaggtgggcaatacgacgctgaccgccctgggtggcattttaaaa

SEQ ID NO: 4185 - DNA, 57 bp, synthetic construct
  source 1..57: mol_type = other DNA
gatgcggaattaaacagcctggcgaagggtgcggtgaaggaattagcgagcttatat

SEQ ID NO: 4186 - DNA, 57 bp, synthetic construct
  source 1..57: mol_type = other DNA
aatagcgcgatcggttatgaagaagccgccaaagtggccaaacaagcgctggccgaa

SEQ ID NO: 4187 - DNA, 57 bp, synthetic construct
  source 1..57: mol_type = other DNA
accggcccggccatcgatcatgcggccgacctgctgttaagccacgcgcgtaacgtg

SEQ ID NO: 4188 - DNA, 57 bp, synthetic construct
  source 1..57: mol_type = other DNA
gcggaagaattagacaaagtggcgcgcttagcggcgaaggcgttagcgagcgttagc

SEQ ID NO: 4189 - DNA, 57 bp, synthetic construct
  source 1..57: mol_type = other DNA
ggcgaactggccaagcatgcggtgtctgagggcaccaaggcggttaccaaatacacc

SEQ ID NO: 4190 - DNA, 57 bp, synthetic construct
  source 1..57: mol_type = other DNA
gatgcggatttagccgcggcggtggagtctgcgaaagccgcgcaaccgaaatgggcg

SEQ ID NO: 4191 - DNA, 57 bp, synthetic construct
  source 1..57: mol_type = other DNA
gaaaaagcgaaggttctggcgaaagccttagataccgccaccggtaaactgttagaa

SEQ ID NO: 4192 - DNA, 57 bp, synthetic construct
  source 1..57: mol_type = other DNA
gatgcggaacaagcccaggaactggcccgcattgcgaaggcggccacctttgccgcg

SEQ ID NO: 4193 - DNA, 57 bp, synthetic construct
  source 1..57: mol_type = other DNA
attgatagcacgatcaaaagcggcttaacggcggcgcgcgatgttaatcgtgccagc

SEQ ID NO: 4194 - DNA, 57 bp, synthetic construct
  source 1..57: mol_type = other DNA
gaagatctgaagaagcatggcgtgacggttctgaccggtctgggtgcgattttaaaa

SEQ ID NO: 4195 - DNA, 57 bp, synthetic construct
  source 1..57: mol_type = other DNA
ggcggcggcacggacctgggcaaattcgttctggcgaagaaagaggaaaatgccaaa

SEQ ID NO: 4196 - DNA, 57 bp, synthetic construct
  source 1..57: mol_type = other DNA
ccgagcgtgggttctctggcggaaaaggttgatgcggagcgtatcgcgattgccaaa

SEQ ID NO: 4197 - DNA, 57 bp, synthetic construct
  source 1..57: mol_type = other DNA
gaagatctgaagaagctgggcgtgacggttctgaccgccctgggtgcgattttaaaa

SEQ ID NO: 4198 - DNA, 57 bp, synthetic construct
  source 1..57: mol_type = other DNA
gcgcaggtgaagggtcatggcaaaaaggttgcggatgccctgacgaatgcggttgcg

SEQ ID NO: 4199 - DNA, 57 bp, synthetic construct
  source 1..57: mol_type = other DNA
aaactgctgtctgccgcgaaaattttagccgatgcgacggcgaagatggtggaagcg

SEQ ID NO: 4200 - protein, 251 aa, synthetic construct
QVQLVESGGGVVQPGRSLRLSCAASGFTFSSYAMHWVRQAPGKGLEWVAVISYDGSNKYYADSVKGRFTISRDNSKNTLYLQMNSLRAEDTAVYYCAADPLDEWDAYLFDVWGQWGQGTLVTVSSGGSSRSSSSGGGGSGGGGEIVLTQSPATLSLSPGERATLSCRASQSVSSSYLAWYQQKPGQAPRLLIYGASSRATGIPARFSGSGSGTDFTLTISRLEPEDFAVYYCEAWESDTRIFGQGTKVEIK

SEQ ID NO: 4201 - protein, 243 aa, synthetic construct
QVQLVESGGGVVQPGRSLRLSCAASGFTFSSYAMHWVRQAPGKGLEWVAVISYDGSNKYYADSVKGRFTISRDNSKNTLYLQMNSLRAEDTAVYYCAAGSTYDVWGQWGQGTLVTVSSGGSSRSSSSGGGGSGGGGEIVLTQSPATLSLSPGERATLSCRASQSVSSSYLAWYQQKPGQAPRLLIYGASSRATGIPARFSGSGSGTDFTLTISRLEPEDFAVYYCQVWDNNVVFGQGTKVEIK

SEQ ID NO: 4202 - protein, 245 aa, synthetic construct
QVQLVESGGGVVQPGRSLRLSCAASGFTFSSYAMHWVRQAPGKGLEWVAVISYDGSNKYYADSVKGRFTISRDNSKNTLYLQMNSLRAEDTAVYYCAAGSTYDVWGQWGQGTLVTVSSGGSSRSSSSGGGGSGGGGEIVLTQSPATLSLSPGERATLSCRASQSVSSSYLAWYQQKPGQAPRLLIYGASSRATGIPARFSGSGSGTDFTLTISRLEPEDFAVYYCQVWDSSSGVVFGQGTKVEIK

SEQ ID NO: 4203 - protein, 254 aa, synthetic construct
QVQLVESGGGVVQPGRSLRLSCAASGFTFSSYAMHWVRQAPGKGLEWVAVISYDGSNKYYADSVKGRFTISRDNSKNTLYLQMNSLRAEDTAVYYCAAHGGTNSRGWKALDYWGQWGQGTLVTVSSGGSSRSSSSGGGGSGGGGEIVLTQSPATLSLSPGERATLSCRASQSVSSSYLAWYQQKPGQAPRLLIYGASSRATGIPARFSGSGSGTDFTLTISRLEPEDFAVYYCQAWDSTTPTVVFGQGTKVEIK

SEQ ID NO: 4204 - protein, 249 aa, synthetic construct
QVQLVESGGGVVQPGRSLRLSCAASGFTFSSYAMHWVRQAPGKGLEWVAVISYDGSNKYYADSVKGRFTISRDNSKNTLYLQMNSLRAEDTAVYYCAGAGSSAASGFATWGQWGQGTLVTVSSGGSSRSSSSGGGGSGGGGEIVLTQSPATLSLSPGERATLSCRASQSVSSSYLAWYQQKPGQAPRLLIYGASSRATGIPARFSGSGSGTDFTLTISRLEPEDFAVYYCQTWGAASGVFGQGTKVEIK

SEQ ID NO: 4205 - protein, 248 aa, synthetic construct
QVQLVESGGGVVQPGRSLRLSCAASGFTFSSYAMHWVRQAPGKGLEWVAVISYDGSNKYYADSVKGRFTISRDNSKNTLYLQMNSLRAEDTAVYYCAKDEVWIAAFDYWGQWGQGTLVTVSSGGSSRSSSSGGGGSGGGGEIVLTQSPATLSLSPGERATLSCRASQSVSSSYLAWYQQKPGQAPRLLIYGASSRATGIPARFSGSGSGTDFTLTISRLEPEDFAVYYCQTWGTGHVVFGQGTKVEIK

SEQ ID NO: 4206 - protein, 254 aa, synthetic construct
QVQLVESGGGVVQPGRSLRLSCAASGFTFSSYAMHWVRQAPGKGLEWVAVISYDGSNKYYADSVKGRFTISRDNSKNTLYLQMNSLRAEDTAVYYCAKDRGGDVVTAGRGFDYWGQWGQGTLVTVSSGGSSRSSSSGGGGSGGGGEIVLTQSPATLSLSPGERATLSCRASQSVSSSYLAWYQQKPGQAPRLLIYGASSRATGIPARFSGSGSGTDFTLTISRLEPEDFAVYYCQQYNNWPPITFGQGTKVEIK

SEQ ID NO: 4207 - protein, 248 aa, synthetic construct
QVQLVESGGGVVQPGRSLRLSCAASGFTFSSYAMHWVRQAPGKGLEWVAVISYDGSNKYYADSVKGRFTISRDNSKNTLYLQMNSLRAEDTAVYYCAKGRWDFDSWGQWGQGTLVTVSSGGSSRSSSSGGGGSGGGGEIVLTQSPATLSLSPGERATLSCRASQSVSSSYLAWYQQKPGQAPRLLIYGASSRATGIPARFSGSGSGTDFTLTISRLEPEDFAVYYCQVWDSSSDKPYVFGQGTKVEIK

SEQ ID NO: 4208 - protein, 252 aa, synthetic construct
QVQLVESGGGVVQPGRSLRLSCAASGFTFSSYAMHWVRQAPGKGLEWVAVISYDGSNKYYADSVKGRFTISRDNSKNTLYLQMNSLRAEDTAVYYCAKNDILAYGSAFDYWGQWGQGTLVTVSSGGSSRSSSSGGGGSGGGGEIVLTQSPATLSLSPGERATLSCRASQSVSSSYLAWYQQKPGQAPRLLIYGASSRATGIPARFSGSGSGTDFTLTISRLEPEDFAVYYCQVWDSSSDHWVFGQGTKVEIK

SEQ ID NO: 4209 - protein, 252 aa, synthetic construct
QVQLVESGGGVVQPGRSLRLSCAASGFTFSSYAMHWVRQAPGKGLEWVAVISYDGSNKYYADSVKGRFTISRDNSKNTLYLQMNSLRAEDTAVYYCAKNDILAYGSASDYWGQWGQGTLVTVSSGGSSRSSSSGGGGSGGGGEIVLTQSPATLSLSPGERATLSCRASQSVSSSYLAWYQQKPGQAPRLLIYGASSRATGIPARFSGSGSGTDFTLTISRLEPEDFAVYYCQVWDSSSDHWVFGQGTKVEIK

SEQ ID NO: 4210 - protein, 252 aa, synthetic construct
QVQLVESGGGVVQPGRSLRLSCAASGFTFSSYAMHWVRQAPGKGLEWVAVISYDGSNKYYADSVKGRFTISRDNSKNTLYLQMNSLRAEDTAVYYCAKNDILTYGSAFDYWGQWGQGTLVTVSSGGSSRSSSSGGGGSGGGGEIVLTQSPATLSLSPGERATLSCRASQSVSSSYLAWYQQKPGQAPRLLIYGASSRATGIPARFSGSGSGTDFTLTISRLEPEDFAVYYCQVWDGGSDHWVFGQGTKVEIK

SEQ ID NO: 4211 - protein, 252 aa, synthetic construct
QVQLVESGGGVVQPGRSLRLSCAASGFTFSSYAMHWVRQAPGKGLEWVAVISYDGSNKYYADSVKGRFTISRDNSKNTLYLQMNSLRAEDTAVYYCAKNDILTYGSAFDYWGQWGQGTLVTVSSGGSSRSSSSGGGGSGGGGEIVLTQSPATLSLSPGERATLSCRASQSVSSSYLAWYQQKPGQAPRLLIYGASSRATGIPARFSGSGSGTDFTLTISRLEPEDFAVYYCQVWDNGSDHWVFGQGTKVEIK

SEQ ID NO: 4212 - protein, 252 aa, synthetic construct
QVQLVESGGGVVQPGRSLRLSCAASGFTFSSYAMHWVRQAPGKGLEWVAVISYDGSNKYYADSVKGRFTISRDNSKNTLYLQMNSLRAEDTAVYYCAKNDILTYGSAFDYWGQWGQGTLVTVSSGGSSRSSSSGGGGSGGGGEIVLTQSPATLSLSPGERATLSCRASQSVSSSYLAWYQQKPGQAPRLLIYGASSRATGIPARFSGSGSGTDFTLTISRLEPEDFAVYYCQVWDSISDHWVFGQGTKVEIK

SEQ ID NO: 4213 - protein, 252 aa, synthetic construct
QVQLVESGGGVVQPGRSLRLSCAASGFTFSSYAMHWVRQAPGKGLEWVAVISYDGSNKYYADSVKGRFTISRDNSKNTLYLQMNSLRAEDTAVYYCAKNDILTYGSAFDYWGQWGQGTLVTVSSGGSSRSSSSGGGGSGGGGEIVLTQSPATLSLSPGERATLSCRASQSVSSSYLAWYQQKPGQAPRLLIYGASSRATGIPARFSGSGSGTDFTLTISRLEPEDFAVYYCQVWDSSSDHWVFGQGTKVEIK

SEQ ID NO: 4214 - protein, 252 aa, synthetic construct
QVQLVESGGGVVQPGRSLRLSCAASGFTFSSYAMHWVRQAPGKGLEWVAVISYDGSNKYYADSVKGRFTISRDNSKNTLYLQMNSLRAEDTAVYYCAKNDILTYGSAFDYWGQWGQGTLVTVSSGGSSRSSSSGGGGSGGGGEIVLTQSPATLSLSPGERATLSCRASQSVSSSYLAWYQQKPGQAPRLLIYGASSRATGIPARFSGSGSGTDFTLTISRLEPEDFAVYYCQVWDTNTDHWLFGQGTKVEIK

SEQ ID NO: 4215 - protein, 247 aa, synthetic construct
QVQLVESGGGVVQPGRSLRLSCAASGFTFSSYAMHWVRQAPGKGLEWVAVISYDGSNKYYADSVKGRFTISRDNSKNTLYLQMNSLRAEDTAVYYCAKNRYSYGDYWGQWGQGTLVTVSSGGSSRSSSSGGGGSGGGGEIVLTQSPATLSLSPGERATLSCRASQSVSSSYLAWYQQKPGQAPRLLIYGASSRATGIPARFSGSGSGTDFTLTISRLEPEDFAVYYCAAWDDLSGWVFGQGTKVEIK

SEQ ID NO: 4216 - protein, 247 aa, synthetic construct
QVQLVESGGGVVQPGRSLRLSCAASGFTFSSYAMHWVRQAPGKGLEWVAVISYDGSNKYYADSVKGRFTISRDNSKNTLYLQMNSLRAEDTAVYYCANGRSSAYFNHWGQWGQGTLVTVSSGGSSRSSSSGGGGSGGGGEIVLTQSPATLSLSPGERATLSCRASQSVSSSYLAWYQQKPGQAPRLLIYGASSRATGIPARFSGSGSGTDFTLTISRLEPEDFAVYYCQQANSFPYTFGQGTKVEIK

SEQ ID NO: 4217 - protein, 247 aa, synthetic construct
QVQLVESGGGVVQPGRSLRLSCAASGFTFSSYAMHWVRQAPGKGLEWVAVISYDGSNKYYADSVKGRFTISRDNSKNTLYLQMNSLRAEDTAVYYCAPNSNSPSYWGQWGQGTLVTVSSGGSSRSSSSGGGGSGGGGEIVLTQSPATLSLSPGERATLSCRASQSVSSSYLAWYQQKPGQAPRLLIYGASSRATGIPARFSGSGSGTDFTLTISRLEPEDFAVYYCHMWNASRNHWVFGQGTKVEIK

SEQ ID NO: 4218 - protein, 247 aa, synthetic construct
QVQLVESGGGVVQPGRSLRLSCAASGFTFSSYAMHWVRQAPGKGLEWVAVISYDGSNKYYADSVKGRFTISRDNSKNTLYLQMNSLRAEDTAVYYCAPNSNSPSYWGQWGQGTLVTVSSGGSSRSSSSGGGGSGGGGEIVLTQSPATLSLSPGERATLSCRASQSVSSSYLAWYQQKPGQAPRLLIYGASSRATGIPARFSGSGSGTDFTLTISRLEPEDFAVYYCHVWDSSGDHWVFGQGTKVEIK

SEQ ID NO: 4219 - protein, 250 aa, synthetic construct
QVQLVESGGGVVQPGRSLRLSCAASGFTFSSYAMHWVRQAPGKGLEWVAVISYDGSNKYYADSVKGRFTISRDNSKNTLYLQMNSLRAEDTAVYYCARANVYQQTWAFDPWGQWGQGTLVTVSSGGSSRSSSSGGGGSGGGGEIVLTQSPATLSLSPGERATLSCRASQSVSSSYLAWYQQKPGQAPRLLIYGASSRATGIPARFSGSGSGTDFTLTISRLEPEDFAVYYCMQGERWPLAFGQGTKVEIK

SEQ ID NO: 4220 - protein, 247 aa, synthetic construct
QVQLVESGGGVVQPGRSLRLSCAASGFTFSSYAMHWVRQAPGKGLEWVAVISYDGSNKYYADSVKGRFTISRDNSKNTLYLQMNSLRAEDTAVYYCARARGANTWDYWGQWGQGTLVTVSSGGSSRSSSSGGGGSGGGGEIVLTQSPATLSLSPGERATLSCRASQSVSSSYLAWYQQKPGQAPRLLIYGASSRATGIPARFSGSGSGTDFTLTISRLEPEDFAVYYCQQEYSFPVTFGQGTKVEIK

SEQ ID NO: 4221 - protein, 248 aa, synthetic construct
QVQLVESGGGVVQPGRSLRLSCAASGFTFSSYAMHWVRQAPGKGLEWVAVISYDGSNKYYADSVKGRFTISRDNSKNTLYLQMNSLRAEDTAVYYCARDFHRAYGMDYWGQWGQGTLVTVSSGGSSRSSSSGGGGSGGGGEIVLTQSPATLSLSPGERATLSCRASQSVSSSYLAWYQQKPGQAPRLLIYGASSRATGIPARFSGSGSGTDFTLTISRLEPEDFAVYYCQQANSFPPTFGQGTKVEIK

SEQ ID NO: 4222 - protein, 250 aa, synthetic construct
QVQLVESGGGVVQPGRSLRLSCAASGFTFSSYAMHWVRQAPGKGLEWVAVISYDGSNKYYADSVKGRFTISRDNSKNTLYLQMNSLRAEDTAVYYCARDGSRDYGAGFDYWGQWGQGTLVTVSSGGSSRSSSSGGGGSGGGGEIVLTQSPATLSLSPGERATLSCRASQSVSSSYLAWYQQKPGQAPRLLIYGASSRATGIPARFSGSGSGTDFTLTISRLEPEDFAVYYCQTWGNTHLVFGQGTKVEIK

SEQ ID NO: 4223 - protein, 247 aa, synthetic construct
QVQLVESGGGVVQPGRSLRLSCAASGFTFSSYAMHWVRQAPGKGLEWVAVISYDGSNKYYADSVKGRFTISRDNSKNTLYLQMNSLRAEDTAVYYCARDPRGDAFDIWGQWGQGTLVTVSSGGSSRSSSSGGGGSGGGGEIVLTQSPATLSLSPGERATLSCRASQSVSSSYLAWYQQKPGQAPRLLIYGASSRATGIPARFSGSGSGTDFTLTISRLEPEDFAVYYCQQYHTTPPTFGQGTKVEIK

SEQ ID NO: 4224 - protein, 249 aa, synthetic construct
QVQLVESGGGVVQPGRSLRLSCAASGFTFSSYAMHWVRQAPGKGLEWVAVISYDGSNKYYADSVKGRFTISRDNSKNTLYLQMNSLRAEDTAVYYCARDRGYSGYGLRYWGQWGQGTLVTVSSGGSSRSSSSGGGGSGGGGEIVLTQSPATLSLSPGERATLSCRASQSVSSSYLAWYQQKPGQAPRLLIYGASSRATGIPARFSGSGSGTDFTLTISRLEPEDFAVYYCQSYDHNSVVFGQGTKVEIK

SEQ ID NO: 4225 - protein, 248 aa, synthetic construct
QVQLVESGGGVVQPGRSLRLSCAASGFTFSSYAMHWVRQAPGKGLEWVAVISYDGSNKYYADSVKGRFTISRDNSKNTLYLQMNSLRAEDTAVYYCARDRTSRAALDYWGQWGQGTLVTVSSGGSSRSSSSGGGGSGGGGEIVLTQSPATLSLSPGERATLSCRASQSVSSSYLAWYQQKPGQAPRLLIYGASSRATGIPARFSGSGSGTDFTLTISRLEPEDFAVYYCQTWGDTHLVFGQGTKVEIK

SEQ ID NO: 4226 - protein, 248 aa, synthetic construct
QVQLVESGGGVVQPGRSLRLSCAASGFTFSSYAMHWVRQAPGKGLEWVAVISYDGSNKYYADSVKGRFTISRDNSKNTLYLQMNSLRAEDTAVYYCARDTGFGSFDYWGQWGQGTLVTVSSGGSSRSSSSGGGGSGGGGEIVLTQSPATLSLSPGERATLSCRASQSVSSSYLAWYQQKPGQAPRLLIYGASSRATGIPARFSGSGSGTDFTLTISRLEPEDFAVYYCSSYTSSSTWGFGQGTKVEIK

SEQ ID NO: 4227 - protein, 248 aa, synthetic construct
QVQLVESGGGVVQPGRSLRLSCAASGFTFSSYAMHWVRQAPGKGLEWVAVISYDGSNKYYADSVKGRFTISRDNSKNTLYLQMNSLRAEDTAVYYCARDTSSGAMDIWGQWGQGTLVTVSSGGSSRSSSSGGGGSGGGGEIVLTQSPATLSLSPGERATLSCRASQSVSSSYLAWYQQKPGQAPRLLIYGASSRATGIPARFSGSGSGTDFTLTISRLEPEDFAVYYCSSFGGNDNLIFGQGTKVEIK

SEQ ID NO: 4228 - protein, 246 aa, synthetic construct
QVQLVESGGGVVQPGRSLRLSCAASGFTFSSYAMHWVRQAPGKGLEWVAVISYDGSNKYYADSVKGRFTISRDNSKNTLYLQMNSLRAEDTAVYYCARDVQYRFDPWGQWGQGTLVTVSSGGSSRSSSSGGGGSGGGGEIVLTQSPATLSLSPGERATLSCRASQSVSSSYLAWYQQKPGQAPRLLIYGASSRATGIPARFSGSGSGTDFTLTISRLEPEDFAVYYCGQNKQFPWTFGQGTKVEIK

SEQ ID NO: 4229 - protein, 246 aa, synthetic construct
QVQLVESGGGVVQPGRSLRLSCAASGFTFSSYAMHWVRQAPGKGLEWVAVISYDGSNKYYADSVKGRFTISRDNSKNTLYLQMNSLRAEDTAVYYCARDWWGAFDVWGQWGQGTLVTVSSGGSSRSSSSGGGGSGGGGEIVLTQSPATLSLSPGERATLSCRASQSVSSSYLAWYQQKPGQAPRLLIYGASSRATGIPARFSGSGSGTDFTLTISRLEPEDFAVYYCQQFNSLGWIFGQGTKVEIK

SEQ ID NO: 4230 - protein, 257 aa, synthetic construct
QVQLVESGGGVVQPGRSLRLSCAASGFTFSSYAMHWVRQAPGKGLEWVAVISYDGSNKYYADSVKGRFTISRDNSKNTLYLQMNSLRAEDTAVYYCARERGGDYGSGYYLPNYGMDVWGQWGQGTLVTVSSGGSSRSSSSGGGGSGGGGEIVLTQSPATLSLSPGERATLSCRASQSVSSSYLAWYQQKPGQAPRLLIYGASSRATGIPARFSGSGSGTDFTLTISRLEPEDFAVYYCQQEGSSPITFGQGTKVEIK

SEQ ID NO: 4231 - protein, 258 aa, synthetic construct
QVQLVESGGGVVQPGRSLRLSCAASGFTFSSYAMHWVRQAPGKGLEWVAVISYDGSNKYYADSVKGRFTISRDNSKNTLYLQMNSLRAEDTAVYYCARERGGDYGSGYYLPNYGMDVWGQWGQGTLVTVSSGGSSRSSSSGGGGSGGGGEIVLTQSPATLSLSPGERATLSCRASQSVSSSYLAWYQQKPGQAPRLLIYGASSRATGIPARFSGSGSGTDFTLTISRLEPEDFAVYYCQQYDTTPPLTFGQGTKVEIK

SEQ ID NO: 4232 - protein, 257 aa, synthetic construct
QVQLVESGGGVVQPGRSLRLSCAASGFTFSSYAMHWVRQAPGKGLEWVAVISYDGSNKYYADSVKGRFTISRDNSKNTLYLQMNSLRAEDTAVYYCARERGGDYGSGYYLPNYGMDVWGQWGQGTLVTVSSGGSSRSSSSGGGGSGGGGEIVLTQSPATLSLSPGERATLSCRASQSVSSSYLAWYQQKPGQAPRLLIYGASSRATGIPARFSGSGSGTDFTLTISRLEPEDFAVYYCQQYGSSPITFGQGTKVEIK

SEQ ID NO: 4233 - protein, 259 aa, synthetic construct
QVQLVESGGGVVQPGRSLRLSCAASGFTFSSYAMHWVRQAPGKGLEWVAVISYDGSNKYYADSVKGRFTISRDNSKNTLYLQMNSLRAEDTAVYYCARERGGDYGSGYYLPNYGMDVWGQWGQGTLVTVSSGGSSRSSSSGGGGSGGGGEIVLTQSPATLSLSPGERATLSCRASQSVSSSYLAWYQQKPGQAPRLLIYGASSRATGIPARFSGSGSGTDFTLTISRLEPEDFAVYYCQSYDFGLGIMVFGQGTKVEIK

SEQ ID NO: 4234 - protein, 260 aa, synthetic construct
QVQLVESGGGVVQPGRSLRLSCAASGFTFSSYAMHWVRQAPGKGLEWVAVISYDGSNKYYADSVKGRFTISRDNSKNTLYLQMNSLRAEDTAVYYCARERGGDYGSGYYLPNYGMDVWGQWGQGTLVTVSSGGSSRSSSSGGGGSGGGGEIVLTQSPATLSLSPGERATLSCRASQSVSSSYLAWYQQKPGQAPRLLIYGASSRATGIPARFSGSGSGTDFTLTISRLEPEDFAVYYCQSYDISNLSHVVFGQGTKVEIK

SEQ ID NO: 4235 - protein, 257 aa, synthetic construct
QVQLVESGGGVVQPGRSLRLSCAASGFTFSSYAMHWVRQAPGKGLEWVAVISYDGSNKYYADSVKGRFTISRDNSKNTLYLQMNSLRAEDTAVYYCARERGGDYGSGYYLPNYGMDVWGQWGQGTLVTVSSGGSSRSSSSGGGGSGGGGEIVLTQSPATLSLSPGERATLSCRASQSVSSSYLAWYQQKPGQAPRLLIYGASSRATGIPARFSGSGSGTDFTLTISRLEPEDFAVYYCSSYTSSSKVFGQGTKVEIK

SEQ ID NO: 4236 - protein, 249 aa, synthetic construct
QVQLVESGGGVVQPGRSLRLSCAASGFTFSSYAMHWVRQAPGKGLEWVAVISYDGSNKYYADSVKGRFTISRDNSKNTLYLQMNSLRAEDTAVYYCAREWGGSWFGMDPWGQWGQGTLVTVSSGGSSRSSSSGGGGSGGGGEIVLTQSPATLSLSPGERATLSCRASQSVSSSYLAWYQQKPGQAPRLLIYGASSRATGIPARFSGSGSGTDFTLTISRLEPEDFAVYYCQQYNSSSITFGQGTKVEIK

SEQ ID NO: 4237 - protein, 249 aa, synthetic construct
QVQLVESGGGVVQPGRSLRLSCAASGFTFSSYAMHWVRQAPGKGLEWVAVISYDGSNKYYADSVKGRFTISRDNSKNTLYLQMNSLRAEDTAVYYCAREWGGSWFGMDPWGQWGQGTLVTVSSGGSSRSSSSGGGGSGGGGEIVLTQSPATLSLSPGERATLSCRASQSVSSSYLAWYQQKPGQAPRLLIYGASSRATGIPARFSGSGSGTDFTLTISRLEPEDFAVYYCQSYDSSNAVFGQGTKVEIK

SEQ ID NO: 4238 - protein, 251 aa, synthetic construct
QVQLVESGGGVVQPGRSLRLSCAASGFTFSSYAMHWVRQAPGKGLEWVAVISYDGSNKYYADSVKGRFTISRDNSKNTLYLQMNSLRAEDTAVYYCAREWLGTTGMDVWGQWGQGTLVTVSSGGSSRSSSSGGGGSGGGGEIVLTQSPATLSLSPGERATLSCRASQSVSSSYLAWYQQKPGQAPRLLIYGASSRATGIPARFSGSGSGTDFTLTISRLEPEDFAVYYCGTWDSSSAPFYVFGQGTKVEIK

SEQ ID NO: 4239 - protein, 251 aa, synthetic construct
QVQLVESGGGVVQPGRSLRLSCAASGFTFSSYAMHWVRQAPGKGLEWVAVISYDGSNKYYADSVKGRFTISRDNSKNTLYLQMNSLRAEDTAVYYCAREWLGTTGMDVWGQWGQGTLVTVSSGGSSRSSSSGGGGSGGGGEIVLTQSPATLSLSPGERATLSCRASQSVSSSYLAWYQQKPGQAPRLLIYGASSRATGIPARFSGSGSGTDFTLTISRLEPEDFAVYYCGTWDSSSGPLKVFGQGTKVEIK

SEQ ID NO: 4240 - protein, 249 aa, synthetic construct
QVQLVESGGGVVQPGRSLRLSCAASGFTFSSYAMHWVRQAPGKGLEWVAVISYDGSNKYYADSVKGRFTISRDNSKNTLYLQMNSLRAEDTAVYYCAREYYGIDVWGQWGQGTLVTVSSGGSSRSSSSGGGGSGGGGEIVLTQSPATLSLSPGERATLSCRASQSVSSSYLAWYQQKPGQAPRLLIYGASSRATGIPARFSGSGSGTDFTLTISRLEPEDFAVYYCQSYDSSLSSPNVVFGQGTKVEIK

SEQ ID NO: 4241 - protein, 252 aa, synthetic construct
QVQLVESGGGVVQPGRSLRLSCAASGFTFSSYAMHWVRQAPGKGLEWVAVISYDGSNKYYADSVKGRFTISRDNSKNTLYLQMNSLRAEDTAVYYCARFGVGYDTHYMYFDHWGQWGQGTLVTVSSGGSSRSSSSGGGGSGGGGEIVLTQSPATLSLSPGERATLSCRASQSVSSSYLAWYQQKPGQAPRLLIYGASSRATGIPARFSGSGSGTDFTLTISRLEPEDFAVYYCQQFHSFPLTFGQGTKVEIK

SEQ ID NO: 4242 - protein, 247 aa, synthetic construct
QVQLVESGGGVVQPGRSLRLSCAASGFTFSSYAMHWVRQAPGKGLEWVAVISYDGSNKYYADSVKGRFTISRDNSKNTLYLQMNSLRAEDTAVYYCARGDFLFRYWGQWGQGTLVTVSSGGSSRSSSSGGGGSGGGGEIVLTQSPATLSLSPGERATLSCRASQSVSSSYLAWYQQKPGQAPRLLIYGASSRATGIPARFSGSGSGTDFTLTISRLEPEDFAVYYCQAWDSSTPFYVFGQGTKVEIK

SEQ ID NO: 4243 - protein, 250 aa, synthetic construct
QVQLVESGGGVVQPGRSLRLSCAASGFTFSSYAMHWVRQAPGKGLEWVAVISYDGSNKYYADSVKGRFTISRDNSKNTLYLQMNSLRAEDTAVYYCARGDSSGWDYFDHWGQWGQGTLVTVSSGGSSRSSSSGGGGSGGGGEIVLTQSPATLSLSPGERATLSCRASQSVSSSYLAWYQQKPGQAPRLLIYGASSRATGIPARFSGSGSGTDFTLTISRLEPEDFAVYYCQQSNSPPPITFGQGTKVEIK

SEQ ID NO: 4244 - protein, 247 aa, synthetic construct
QVQLVESGGGVVQPGRSLRLSCAASGFTFSSYAMHWVRQAPGKGLEWVAVISYDGSNKYYADSVKGRFTISRDNSKNTLYLQMNSLRAEDTAVYYCARGGASIGVFDVWGQWGQGTLVTVSSGGSSRSSSSGGGGSGGGGEIVLTQSPATLSLSPGERATLSCRASQSVSSSYLAWYQQKPGQAPRLLIYGASSRATGIPARFSGSGSGTDFTLTISRLEPEDFAVYYCQTWGTGMVFGQGTKVEIK

SEQ ID NO: 4245 - protein, 250 aa, synthetic construct
QVQLVESGGGVVQPGRSLRLSCAASGFTFSSYAMHWVRQAPGKGLEWVAVISYDGSNKYYADSVKGRFTISRDNSKNTLYLQMNSLRAEDTAVYYCARGGSVDIAYGFDYWGQWGQGTLVTVSSGGSSRSSSSGGGGSGGGGEIVLTQSPATLSLSPGERATLSCRASQSVSSSYLAWYQQKPGQAPRLLIYGASSRATGIPARFSGSGSGTDFTLTISRLEPEDFAVYYCQQANSFPLTFGQGTKVEIK

SEQ ID NO: 4246 - protein, 249 aa, synthetic construct
QVQLVESGGGVVQPGRSLRLSCAASGFTFSSYAMHWVRQAPGKGLEWVAVISYDGSNKYYADSVKGRFTISRDNSKNTLYLQMNSLRAEDTAVYYCARGLIMTPGYLDYWGQWGQGTLVTVSSGGSSRSSSSGGGGSGGGGEIVLTQSPATLSLSPGERATLSCRASQSVSSSYLAWYQQKPGQAPRLLIYGASSRATGIPARFSGSGSGTDFTLTISRLEPEDFAVYYCQTWGTGGLVFGQGTKVEIK

SEQ ID NO: 4247 - protein, 249 aa, synthetic construct
QVQLVESGGGVVQPGRSLRLSCAASGFTFSSYAMHWVRQAPGKGLEWVAVISYDGSNKYYADSVKGRFTISRDNSKNTLYLQMNSLRAEDTAVYYCARGPGYSYAAMDVWGQWGQGTLVTVSSGGSSRSSSSGGGGSGGGGEIVLTQSPATLSLSPGERATLSCRASQSVSSSYLAWYQQKPGQAPRLLIYGASSRATGIPARFSGSGSGTDFTLTISRLEPEDFAVYYCQQDYSFPPTFGQGTKVEIK

SEQ ID NO: 4248 - protein, 250 aa, synthetic construct
QVQLVESGGGVVQPGRSLRLSCAASGFTFSSYAMHWVRQAPGKGLEWVAVISYDGSNKYYADSVKGRFTISRDNSKNTLYLQMNSLRAEDTAVYYCARGPRFGELPFDYWGQWGQGTLVTVSSGGSSRSSSSGGGGSGGGGEIVLTQSPATLSLSPGERATLSCRASQSVSSSYLAWYQQKPGQAPRLLIYGASSRATGIPARFSGSGSGTDFTLTISRLEPEDFAVYYCQQSYSNTTWLFGQGTKVEIK

SEQ ID NO: 4249 - protein, 256 aa, synthetic construct
QVQLVESGGGVVQPGRSLRLSCAASGFTFSSYAMHWVRQAPGKGLEWVAVISYDGSNKYYADSVKGRFTISRDNSKNTLYLQMNSLRAEDTAVYYCARGRYLASSSAHGGYYALDYWGQWGQGTLVTVSSGGSSRSSSSGGGGSGGGGEIVLTQSPATLSLSPGERATLSCRASQSVSSSYLAWYQQKPGQAPRLLIYGASSRATGIPARFSGSGSGTDFTLTISRLEPEDFAVYYCQQAYSPPISFGQGTKVEIK

SEQ ID NO: 4250 - protein, 256 aa, synthetic construct
QVQLVESGGGVVQPGRSLRLSCAASGFTFSSYAMHWVRQAPGKGLEWVAVISYDGSNKYYADSVKGRFTISRDNSKNTLYLQMNSLRAEDTAVYYCARGRYLASSSAHGGYYALDYWGQWGQGTLVTVSSGGSSRSSSSGGGGSGGGGEIVLTQSPATLSLSPGERATLSCRASQSVSSSYLAWYQQKPGQAPRLLIYGASSRATGIPARFSGSGSGTDFTLTISRLEPEDFAVYYCQQAYSPPITFGQGTKVEIK

SEQ ID NO: 4251 - protein, 254 aa, synthetic construct
QVQLVESGGGVVQPGRSLRLSCAASGFTFSSYAMHWVRQAPGKGLEWVAVISYDGSNKYYADSVKGRFTISRDNSKNTLYLQMNSLRAEDTAVYYCARGRYRNLSYDDDDFDIWGQWGQGTLVTVSSGGSSRSSSSGGGGSGGGGEIVLTQSPATLSLSPGERATLSCRASQSVSSSYLAWYQQKPGQAPRLLIYGASSRATGIPARFSGSGSGTDFTLTISRLEPEDFAVYYCQAWDSSTGVVFGQGTKVEIK

SEQ ID NO: 4252 - protein, 250 aa, synthetic construct
QVQLVESGGGVVQPGRSLRLSCAASGFTFSSYAMHWVRQAPGKGLEWVAVISYDGSNKYYADSVKGRFTISRDNSKNTLYLQMNSLRAEDTAVYYCARGSVSTGIAFYYWGQWGQGTLVTVSSGGSSRSSSSGGGGSGGGGEIVLTQSPATLSLSPGERATLSCRASQSVSSSYLAWYQQKPGQAPRLLIYGASSRATGIPARFSGSGSGTDFTLTISRLEPEDFAVYYCSSYTSSSSLVFGQGTKVEIK

SEQ ID NO: 4253 - protein, 247 aa, synthetic construct
QVQLVESGGGVVQPGRSLRLSCAASGFTFSSYAMHWVRQAPGKGLEWVAVISYDGSNKYYADSVKGRFTISRDNSKNTLYLQMNSLRAEDTAVYYCARHDFSTGAYDWGQWGQGTLVTVSSGGSSRSSSSGGGGSGGGGEIVLTQSPATLSLSPGERATLSCRASQSVSSSYLAWYQQKPGQAPRLLIYGASSRATGIPARFSGSGSGTDFTLTISRLEPEDFAVYYCMQGARWPLAFGQGTKVEIK

SEQ ID NO: 4254 - protein, 257 aa, synthetic construct
QVQLVESGGGVVQPGRSLRLSCAASGFTFSSYAMHWVRQAPGKGLEWVAVISYDGSNKYYADSVKGRFTISRDNSKNTLYLQMNSLRAEDTAVYYCARLGYKGFAYLGSYSSYAFDLWGQWGQGTLVTVSSGGSSRSSSSGGGGSGGGGEIVLTQSPATLSLSPGERATLSCRASQSVSSSYLAWYQQKPGQAPRLLIYGASSRATGIPARFSGSGSGTDFTLTISRLEPEDFAVYYCQQSNSPPITFGQGTKVEIK

SEQ ID NO: 4255 - protein, 249 aa, synthetic construct
QVQLVESGGGVVQPGRSLRLSCAASGFTFSSYAMHWVRQAPGKGLEWVAVISYDGSNKYYADSVKGRFTISRDNSKNTLYLQMNSLRAEDTAVYYCARLSGTYYYAMDVWGQWGQGTLVTVSSGGSSRSSSSGGGGSGGGGEIVLTQSPATLSLSPGERATLSCRASQSVSSSYLAWYQQKPGQAPRLLIYGASSRATGIPARFSGSGSGTDFTLTISRLEPEDFAVYYCQQSDRLPLTFGQGTKVEIK

SEQ ID NO: 4256 - protein, 252 aa, synthetic construct
QVQLVESGGGVVQPGRSLRLSCAASGFTFSSYAMHWVRQAPGKGLEWVAVISYDGSNKYYADSVKGRFTISRDNSKNTLYLQMNSLRAEDTAVYYCARLYHTAYRYTYYFDVWGQWGQGTLVTVSSGGSSRSSSSGGGGSGGGGEIVLTQSPATLSLSPGERATLSCRASQSVSSSYLAWYQQKPGQAPRLLIYGASSRATGIPARFSGSGSGTDFTLTISRLEPEDFAVYYCHVWDSSDVVFGQGTKVEIK

SEQ ID NO: 4257 - protein, 255 aa, synthetic construct
QVQLVESGGGVVQPGRSLRLSCAASGFTFSSYAMHWVRQAPGKGLEWVAVISYDGSNKYYADSVKGRFTISRDNSKNTLYLQMNSLRAEDTAVYYCARMRWGIYRGKLSVYMDVWGQWGQGTLVTVSSGGSSRSSSSGGGGSGGGGEIVLTQSPATLSLSPGERATLSCRASQSVSSSYLAWYQQKPGQAPRLLIYGASSRATGIPARFSGSGSGTDFTLTISRLEPEDFAVYYCQSYDSSLSGVFGQGTKVEIK

SEQ ID NO: 4258 - protein, 247 aa, synthetic construct
QVQLVESGGGVVQPGRSLRLSCAASGFTFSSYAMHWVRQAPGKGLEWVAVISYDGSNKYYADSVKGRFTISRDNSKNTLYLQMNSLRAEDTAVYYCARMSRYGAFDLWGQWGQGTLVTVSSGGSSRSSSSGGGGSGGGGEIVLTQSPATLSLSPGERATLSCRASQSVSSSYLAWYQQKPGQAPRLLIYGASSRATGIPARFSGSGSGTDFTLTISRLEPEDFAVYYCQQYNNWPLTFGQGTKVEIK

SEQ ID NO: 4259 - protein, 246 aa, synthetic construct
QVQLVESGGGVVQPGRSLRLSCAASGFTFSSYAMHWVRQAPGKGLEWVAVISYDGSNKYYADSVKGRFTISRDNSKNTLYLQMNSLRAEDTAVYYCARNHHSDFDHWGQWGQGTLVTVSSGGSSRSSSSGGGGSGGGGEIVLTQSPATLSLSPGERATLSCRASQSVSSSYLAWYQQKPGQAPRLLIYGASSRATGIPARFSGSGSGTDFTLTISRLEPEDFAVYYCQEYNAYPTTFGQGTKVEIK

SEQ ID NO: 4260 - protein, 246 aa, synthetic construct
QVQLVESGGGVVQPGRSLRLSCAASGFTFSSYAMHWVRQAPGKGLEWVAVISYDGSNKYYADSVKGRFTISRDNSKNTLYLQMNSLRAEDTAVYYCARNHHSDFDHWGQWGQGTLVTVSSGGSSRSSSSGGGGSGGGGEIVLTQSPATLSLSPGERATLSCRASQSVSSSYLAWYQQKPGQAPRLLIYGASSRATGIPARFSGSGSGTDFTLTISRLEPEDFAVYYCQQTVTPPFTFGQGTKVEIK

SEQ ID NO: 4261 - protein, 246 aa, synthetic construct
QVQLVESGGGVVQPGRSLRLSCAASGFTFSSYAMHWVRQAPGKGLEWVAVISYDGSNKYYADSVKGRFTISRDNSKNTLYLQMNSLRAEDTAVYYCARNHHSDFDHWGQWGQGTLVTVSSGGSSRSSSSGGGGSGGGGEIVLTQSPATLSLSPGERATLSCRASQSVSSSYLAWYQQKPGQAPRLLIYGASSRATGIPARFSGSGSGTDFTLTISRLEPEDFAVYYCQQYGSSPRTFGQGTKVEIK

SEQ ID NO: 4262 - protein, 246 aa, synthetic construct
QVQLVESGGGVVQPGRSLRLSCAASGFTFSSYAMHWVRQAPGKGLEWVAVISYDGSNKYYADSVKGRFTISRDNSKNTLYLQMNSLRAEDTAVYYCARNHHSDFDHWGQWGQGTLVTVSSGGSSRSSSSGGGGSGGGGEIVLTQSPATLSLSPGERATLSCRASQSVSSSYLAWYQQKPGQAPRLLIYGASSRATGIPARFSGSGSGTDFTLTISRLEPEDFAVYYCQQYYSTPRTFGQGTKVEIK

SEQ ID NO: 4263 - protein, 250 aa, synthetic construct
QVQLVESGGGVVQPGRSLRLSCAASGFTFSSYAMHWVRQAPGKGLEWVAVISYDGSNKYYADSVKGRFTISRDNSKNTLYLQMNSLRAEDTAVYYCARNRGTGDLDYWGQWGQGTLVTVSSGGSSRSSSSGGGGSGGGGEIVLTQSPATLSLSPGERATLSCRASQSVSSSYLAWYQQKPGQAPRLLIYGASSRATGIPARFSGSGSGTDFTLTISRLEPEDFAVYYCQVWDNGSDHLVVFGQGTKVEIK

SEQ ID NO: 4264 - protein, 250 aa, synthetic construct
QVQLVESGGGVVQPGRSLRLSCAASGFTFSSYAMHWVRQAPGKGLEWVAVISYDGSNKYYADSVKGRFTISRDNSKNTLYLQMNSLRAEDTAVYYCARNRGTGDLDYWGQWGQGTLVTVSSGGSSRSSSSGGGGSGGGGEIVLTQSPATLSLSPGERATLSCRASQSVSSSYLAWYQQKPGQAPRLLIYGASSRATGIPARFSGSGSGTDFTLTISRLEPEDFAVYYCQVWDSSSDHLVVFGQGTKVEIK

SEQ ID NO: 4265 - protein, 252 aa, synthetic construct
QVQLVESGGGVVQPGRSLRLSCAASGFTFSSYAMHWVRQAPGKGLEWVAVISYDGSNKYYADSVKGRFTISRDNSKNTLYLQMNSLRAEDTAVYYCARNSGQGDLNPWGQWGQGTLVTVSSGGSSRSSSSGGGGSGGGGEIVLTQSPATLSLSPGERATLSCRASQSVSSSYLAWYQQKPGQAPRLLIYGASSRATGIPARFSGSGSGTDFTLTISRLEPEDFAVYYCGTWDSSLLSSSLVVFGQGTKVEIK

SEQ ID NO: 4266 - protein, 250 aa, synthetic construct
QVQLVESGGGVVQPGRSLRLSCAASGFTFSSYAMHWVRQAPGKGLEWVAVISYDGSNKYYADSVKGRFTISRDNSKNTLYLQMNSLRAEDTAVYYCARNSGQGDLNPWGQWGQGTLVTVSSGGSSRSSSSGGGGSGGGGEIVLTQSPATLSLSPGERATLSCRASQSVSSSYLAWYQQKPGQAPRLLIYGASSRATGIPARFSGSGSGTDFTLTISRLEPEDFAVYYCQAWDTSTSSHVVFGQGTKVEIK

SEQ ID NO: 4267 - protein, 250 aa, synthetic construct
QVQLVESGGGVVQPGRSLRLSCAASGFTFSSYAMHWVRQAPGKGLEWVAVISYDGSNKYYADSVKGRFTISRDNSKNTLYLQMNSLRAEDTAVYYCARNSGQGDLNPWGQWGQGTLVTVSSGGSSRSSSSGGGGSGGGGEIVLTQSPATLSLSPGERATLSCRASQSVSSSYLAWYQQKPGQAPRLLIYGASSRATGIPARFSGSGSGTDFTLTISRLEPEDFAVYYCQVWDSSASPHVVFGQGTKVEIK

SEQ ID NO: 4268 - protein, 250 aa, synthetic construct
QVQLVESGGGVVQPGRSLRLSCAASGFTFSSYAMHWVRQAPGKGLEWVAVISYDGSNKYYADSVKGRFTISRDNSKNTLYLQMNSLRAEDTAVYYCARNSGQGDLNPWGQWGQGTLVTVSSGGSSRSSSSGGGGSGGGGEIVLTQSPATLSLSPGERATLSCRASQSVSSSYLAWYQQKPGQAPRLLIYGASSRATGIPARFSGSGSGTDFTLTISRLEPEDFAVYYCQVWDSSSDGLVVFGQGTKVEIK

SEQ ID NO: 4269 - protein, 250 aa, synthetic construct
QVQLVESGGGVVQPGRSLRLSCAASGFTFSSYAMHWVRQAPGKGLEWVAVISYDGSNKYYADSVKGRFTISRDNSKNTLYLQMNSLRAEDTAVYYCARNSGQGELKPWGQWGQGTLVTVSSGGSSRSSSSGGGGSGGGGEIVLTQSPATLSLSPGERATLSCRASQSVSSSYLAWYQQKPGQAPRLLIYGASSRATGIPARFSGSGSGTDFTLTISRLEPEDFAVYYCQVWDTSGNHPVVFGQGTKVEIK

SEQ ID NO: 4270 - protein, 250 aa, synthetic construct
QVQLVESGGGVVQPGRSLRLSCAASGFTFSSYAMHWVRQAPGKGLEWVAVISYDGSNKYYADSVKGRFTISRDNSKNTLYLQMNSLRAEDTAVYYCARNSGQGELNPWGQWGQGTLVTVSSGGSSRSSSSGGGGSGGGGEIVLTQSPATLSLSPGERATLSCRASQSVSSSYLAWYQQKPGQAPRLLIYGASSRATGIPARFSGSGSGTDFTLTISRLEPEDFAVYYCQVWDASSDPFVVFGQGTKVEIK

SEQ ID NO: 4271 - protein, 250 aa, synthetic construct
QVQLVESGGGVVQPGRSLRLSCAASGFTFSSYAMHWVRQAPGKGLEWVAVISYDGSNKYYADSVKGRFTISRDNSKNTLYLQMNSLRAEDTAVYYCARNSGQGELNPWGQWGQGTLVTVSSGGSSRSSSSGGGGSGGGGEIVLTQSPATLSLSPGERATLSCRASQSVSSSYLAWYQQKPGQAPRLLIYGASSRATGIPARFSGSGSGTDFTLTISRLEPEDFAVYYCQVWDSSSDHHVVFGQGTKVEIK

SEQ ID NO: 4272 - protein, 249 aa, synthetic construct
QVQLVESGGGVVQPGRSLRLSCAASGFTFSSYAMHWVRQAPGKGLEWVAVISYDGSNKYYADSVKGRFTISRDNSKNTLYLQMNSLRAEDTAVYYCARNSGQGELNPWGQWGQGTLVTVSSGGSSRSSSSGGGGSGGGGEIVLTQSPATLSLSPGERATLSCRASQSVSSSYLAWYQQKPGQAPRLLIYGASSRATGIPARFSGSGSGTDFTLTISRLEPEDFAVYYCQVWDSSSPVVVFGQGTKVEIK

SEQ ID NO: 4273 - protein, 245 aa, synthetic construct
QVQLVESGGGVVQPGRSLRLSCAASGFTFSSYAMHWVRQAPGKGLEWVAVISYDGSNKYYADSVKGRFTISRDNSKNTLYLQMNSLRAEDTAVYYCARNWNDFDYWGQWGQGTLVTVSSGGSSRSSSSGGGGSGGGGEIVLTQSPATLSLSPGERATLSCRASQSVSSSYLAWYQQKPGQAPRLLIYGASSRATGIPARFSGSGSGTDFTLTISRLEPEDFAVYYCQRYESSPRTFGQGTKVEIK

SEQ ID NO: 4274 - protein, 252 aa, synthetic construct
QVQLVESGGGVVQPGRSLRLSCAASGFTFSSYAMHWVRQAPGKGLEWVAVISYDGSNKYYADSVKGRFTISRDNSKNTLYLQMNSLRAEDTAVYYCARPLPNVGYGMDVWGQWGQGTLVTVSSGGSSRSSSSGGGGSGGGGEIVLTQSPATLSLSPGERATLSCRASQSVSSSYLAWYQQKPGQAPRLLIYGASSRATGIPARFSGSGSGTDFTLTISRLEPEDFAVYYCGTWDSSLLLSYVFGQGTKVEIK

SEQ ID NO: 4275 - protein, 250 aa, synthetic construct
QVQLVESGGGVVQPGRSLRLSCAASGFTFSSYAMHWVRQAPGKGLEWVAVISYDGSNKYYADSVKGRFTISRDNSKNTLYLQMNSLRAEDTAVYYCARQGWLATTRGMDLWGQWGQGTLVTVSSGGSSRSSSSGGGGSGGGGEIVLTQSPATLSLSPGERATLSCRASQSVSSSYLAWYQQKPGQAPRLLIYGASSRATGIPARFSGSGSGTDFTLTISRLEPEDFAVYYCQAGDRTTGQFGQGTKVEIK

SEQ ID NO: 4276 - protein, 247 aa, synthetic construct
QVQLVESGGGVVQPGRSLRLSCAASGFTFSSYAMHWVRQAPGKGLEWVAVISYDGSNKYYADSVKGRFTISRDNSKNTLYLQMNSLRAEDTAVYYCARQKLRGDGFDTWGQWGQGTLVTVSSGGSSRSSSSGGGGSGGGGEIVLTQSPATLSLSPGERATLSCRASQSVSSSYLAWYQQKPGQAPRLLIYGASSRATGIPARFSGSGSGTDFTLTISRLEPEDFAVYYCQHYGGPFTFGQGTKVEIK

SEQ ID NO: 4277 - protein, 248 aa, synthetic construct
QVQLVESGGGVVQPGRSLRLSCAASGFTFSSYAMHWVRQAPGKGLEWVAVISYDGSNKYYADSVKGRFTISRDNSKNTLYLQMNSLRAEDTAVYYCARSGNSYGQFDYWGQWGQGTLVTVSSGGSSRSSSSGGGGSGGGGEIVLTQSPATLSLSPGERATLSCRASQSVSSSYLAWYQQKPGQAPRLLIYGASSRATGIPARFSGSGSGTDFTLTISRLEPEDFAVYYCQTWGTGHVVFGQGTKVEIK

SEQ ID NO: 4278 - protein, 248 aa, synthetic construct
QVQLVESGGGVVQPGRSLRLSCAASGFTFSSYAMHWVRQAPGKGLEWVAVISYDGSNKYYADSVKGRFTISRDNSKNTLYLQMNSLRAEDTAVYYCARSGQYGGYFDYWGQWGQGTLVTVSSGGSSRSSSSGGGGSGGGGEIVLTQSPATLSLSPGERATLSCRASQSVSSSYLAWYQQKPGQAPRLLIYGASSRATGIPARFSGSGSGTDFTLTISRLEPEDFAVYYCQQEYSFPVTFGQGTKVEIK

SEQ ID NO: 4279 - protein, 246 aa, synthetic construct
QVQLVESGGGVVQPGRSLRLSCAASGFTFSSYAMHWVRQAPGKGLEWVAVISYDGSNKYYADSVKGRFTISRDNSKNTLYLQMNSLRAEDTAVYYCARTAAYVLGHWGQWGQGTLVTVSSGGSSRSSSSGGGGSGGGGEIVLTQSPATLSLSPGERATLSCRASQSVSSSYLAWYQQKPGQAPRLLIYGASSRATGIPARFSGSGSGTDFTLTISRLEPEDFAVYYCQQSYSIPFTFGQGTKVEIK

SEQ ID NO: 4280 - protein, 246 aa, synthetic construct
QVQLVESGGGVVQPGRSLRLSCAASGFTFSSYAMHWVRQAPGKGLEWVAVISYDGSNKYYADSVKGRFTISRDNSKNTLYLQMNSLRAEDTAVYYCARTAAYVLGHWGQWGQGTLVTVSSGGSSRSSSSGGGGSGGGGEIVLTQSPATLSLSPGERATLSCRASQSVSSSYLAWYQQKPGQAPRLLIYGASSRATGIPARFSGSGSGTDFTLTISRLEPEDFAVYYCQQSYSIPLTFGQGTKVEIK

SEQ ID NO: 4281 - protein, 250 aa, synthetic construct
QVQLVESGGGVVQPGRSLRLSCAASGFTFSSYAMHWVRQAPGKGLEWVAVISYDGSNKYYADSVKGRFTISRDNSKNTLYLQMNSLRAEDTAVYYCARTRIGYSHHADYWGQWGQGTLVTVSSGGSSRSSSSGGGGSGGGGEIVLTQSPATLSLSPGERATLSCRASQSVSSSYLAWYQQKPGQAPRLLIYGASSRATGIPARFSGSGSGTDFTLTISRLEPEDFAVYYCYSYVGSSTWVFGQGTKVEIK

SEQ ID NO: 4282 - protein, 249 aa, synthetic construct
QVQLVESGGGVVQPGRSLRLSCAASGFTFSSYAMHWVRQAPGKGLEWVAVISYDGSNKYYADSVKGRFTISRDNSKNTLYLQMNSLRAEDTAVYYCARTVGAAAFDIWGQWGQGTLVTVSSGGSSRSSSSGGGGSGGGGEIVLTQSPATLSLSPGERATLSCRASQSVSSSYLAWYQQKPGQAPRLLIYGASSRATGIPARFSGSGSGTDFTLTISRLEPEDFAVYYCGTLDSILRSWVFGQGTKVEIK

SEQ ID NO: 4283 - protein, 250 aa, synthetic construct
QVQLVESGGGVVQPGRSLRLSCAASGFTFSSYAMHWVRQAPGKGLEWVAVISYDGSNKYYADSVKGRFTISRDNSKNTLYLQMNSLRAEDTAVYYCARTVGPYGRTYFDYWGQWGQGTLVTVSSGGSSRSSSSGGGGSGGGGEIVLTQSPATLSLSPGERATLSCRASQSVSSSYLAWYQQKPGQAPRLLIYGASSRATGIPARFSGSGSGTDFTLTISRLEPEDFAVYYCQQAISFPLTFGQGTKVEIK

SEQ ID NO: 4284 - protein, 250 aa, synthetic construct
QVQLVESGGGVVQPGRSLRLSCAASGFTFSSYAMHWVRQAPGKGLEWVAVISYDGSNKYYADSVKGRFTISRDNSKNTLYLQMNSLRAEDTAVYYCARTVGPYGRTYFDYWGQWGQGTLVTVSSGGSSRSSSSGGGGSGGGGEIVLTQSPATLSLSPGERATLSCRASQSVSSSYLAWYQQKPGQAPRLLIYGASSRATGIPARFSGSGSGTDFTLTISRLEPEDFAVYYCQQANSFPITFGQGTKVEIK

SEQ ID NO: 4285 - protein, 250 aa, synthetic construct
QVQLVESGGGVVQPGRSLRLSCAASGFTFSSYAMHWVRQAPGKGLEWVAVISYDGSNKYYADSVKGRFTISRDNSKNTLYLQMNSLRAEDTAVYYCARTVGPYGRTYFDYWGQWGQGTLVTVSSGGSSRSSSSGGGGSGGGGEIVLTQSPATLSLSPGERATLSCRASQSVSSSYLAWYQQKPGQAPRLLIYGASSRATGIPARFSGSGSGTDFTLTISRLEPEDFAVYYCQQANSFPLTFGQGTKVEIK

SEQ ID NO: 4286 - protein, 250 aa, synthetic construct
QVQLVESGGGVVQPGRSLRLSCAASGFTFSSYAMHWVRQAPGKGLEWVAVISYDGSNKYYADSVKGRFTISRDNSKNTLYLQMNSLRAEDTAVYYCARTVGPYGRTYFDYWGQWGQGTLVTVSSGGSSRSSSSGGGGSGGGGEIVLTQSPATLSLSPGERATLSCRASQSVSSSYLAWYQQKPGQAPRLLIYGASSRATGIPARFSGSGSGTDFTLTISRLEPEDFAVYYCQQANSFPPTFGQGTKVEIK

SEQ ID NO: 4287 - protein, 250 aa, synthetic construct
QVQLVESGGGVVQPGRSLRLSCAASGFTFSSYAMHWVRQAPGKGLEWVAVISYDGSNKYYADSVKGRFTISRDNSKNTLYLQMNSLRAEDTAVYYCARTVGPYGRTYFDYWGQWGQGTLVTVSSGGSSRSSSSGGGGSGGGGEIVLTQSPATLSLSPGERATLSCRASQSVSSSYLAWYQQKPGQAPRLLIYGASSRATGIPARFSGSGSGTDFTLTISRLEPEDFAVYYCQQAYSFPPTFGQGTKVEIK

SEQ ID NO: 4288 - protein, 250 aa, synthetic construct
QVQLVESGGGVVQPGRSLRLSCAASGFTFSSYAMHWVRQAPGKGLEWVAVISYDGSNKYYADSVKGRFTISRDNSKNTLYLQMNSLRAEDTAVYYCARTVGPYGRTYFDYWGQWGQGTLVTVSSGGSSRSSSSGGGGSGGGGEIVLTQSPATLSLSPGERATLSCRASQSVSSSYLAWYQQKPGQAPRLLIYGASSRATGIPARFSGSGSGTDFTLTISRLEPEDFAVYYCQQGINWPLTFGQGTKVEIK

SEQ ID NO: 4289 - protein, 249 aa, synthetic construct
QVQLVESGGGVVQPGRSLRLSCAASGFTFSSYAMHWVRQAPGKGLEWVAVISYDGSNKYYADSVKGRFTISRDNSKNTLYLQMNSLRAEDTAVYYCARTVGPYGRTYFDYWGQWGQGTLVTVSSGGSSRSSSSGGGGSGGGGEIVLTQSPATLSLSPGERATLSCRASQSVSSSYLAWYQQKPGQAPRLLIYGASSRATGIPARFSGSGSGTDFTLTISRLEPEDFAVYYCQTWGSGIVFGQGTKVEIK

SEQ ID NO: 4290 - protein, 254 aa, synthetic construct
QVQLVESGGGVVQPGRSLRLSCAASGFTFSSYAMHWVRQAPGKGLEWVAVISYDGSNKYYADSVKGRFTISRDNSKNTLYLQMNSLRAEDTAVYYCARWNIAIVGAAPVPVMDVWGQWGQGTLVTVSSGGSSRSSSSGGGGSGGGGEIVLTQSPATLSLSPGERATLSCRASQSVSSSYLAWYQQKPGQAPRLLIYGASSRATGIPARFSGSGSGTDFTLTISRLEPEDFAVYYCQQANSFPLTFGQGTKVEIK

SEQ ID NO: 4291 - protein, 254 aa, synthetic construct
QVQLVESGGGVVQPGRSLRLSCAASGFTFSSYAMHWVRQAPGKGLEWVAVISYDGSNKYYADSVKGRFTISRDNSKNTLYLQMNSLRAEDTAVYYCARWNIAIVGAAPVPVMDVWGQWGQGTLVTVSSGGSSRSSSSGGGGSGGGGEIVLTQSPATLSLSPGERATLSCRASQSVSSSYLAWYQQKPGQAPRLLIYGASSRATGIPARFSGSGSGTDFTLTISRLEPEDFAVYYCQQANSFPVSFGQGTKVEIK

SEQ ID NO: 4292 - protein, 254 aa, synthetic construct
QVQLVESGGGVVQPGRSLRLSCAASGFTFSSYAMHWVRQAPGKGLEWVAVISYDGSNKYYADSVKGRFTISRDNSKNTLYLQMNSLRAEDTAVYYCARWNIAIVGAAPVPVMDVWGQWGQGTLVTVSSGGSSRSSSSGGGGSGGGGEIVLTQSPATLSLSPGERATLSCRASQSVSSSYLAWYQQKPGQAPRLLIYGASSRATGIPARFSGSGSGTDFTLTISRLEPEDFAVYYCQQANSFPVTFGQGTKVEIK

SEQ ID NO: 4293 - protein, 248 aa, synthetic construct
QVQLVESGGGVVQPGRSLRLSCAASGFTFSSYAMHWVRQAPGKGLEWVAVISYDGSNKYYADSVKGRFTISRDNSKNTLYLQMNSLRAEDTAVYYCARYGSNYRYFDRWGQWGQGTLVTVSSGGSSRSSSSGGGGSGGGGEIVLTQSPATLSLSPGERATLSCRASQSVSSSYLAWYQQKPGQAPRLLIYGASSRATGIPARFSGSGSGTDFTLTISRLEPEDFAVYYCMQGSHWPWAFGQGTKVEIK

SEQ ID NO: 4294 - protein, 248 aa, synthetic construct
QVQLVESGGGVVQPGRSLRLSCAASGFTFSSYAMHWVRQAPGKGLEWVAVISYDGSNKYYADSVKGRFTISRDNSKNTLYLQMNSLRAEDTAVYYCASAGPDDDFDYWGQWGQGTLVTVSSGGSSRSSSSGGGGSGGGGEIVLTQSPATLSLSPGERATLSCRASQSVSSSYLAWYQQKPGQAPRLLIYGASSRATGIPARFSGSGSGTDFTLTISRLEPEDFAVYYCQAWDSSTGVVFGQGTKVEIK

SEQ ID NO: 4295 - protein, 246 aa, synthetic construct
QVQLVESGGGVVQPGRSLRLSCAASGFTFSSYAMHWVRQAPGKGLEWVAVISYDGSNKYYADSVKGRFTISRDNSKNTLYLQMNSLRAEDTAVYYCASAGPDDDFDYWGQWGQGTLVTVSSGGSSRSSSSGGGGSGGGGEIVLTQSPATLSLSPGERATLSCRASQSVSSSYLAWYQQKPGQAPRLLIYGASSRATGIPARFSGSGSGTDFTLTISRLEPEDFAVYYCQVWDSSTVFGQGTKVEIK

SEQ ID NO: 4296 - protein, 248 aa, synthetic construct
QVQLVESGGGVVQPGRSLRLSCAASGFTFSSYAMHWVRQAPGKGLEWVAVISYDGSNKYYADSVKGRFTISRDNSKNTLYLQMNSLRAEDTAVYYCASPKYGDFYFDYWGQWGQGTLVTVSSGGSSRSSSSGGGGSGGGGEIVLTQSPATLSLSPGERATLSCRASQSVSSSYLAWYQQKPGQAPRLLIYGASSRATGIPARFSGSGSGTDFTLTISRLEPEDFAVYYCQQHYAIPLTFGQGTKVEIK

SEQ ID NO: 4297 - protein, 246 aa, synthetic construct
QVQLVESGGGVVQPGRSLRLSCAASGFTFSSYAMHWVRQAPGKGLEWVAVISYDGSNKYYADSVKGRFTISRDNSKNTLYLQMNSLRAEDTAVYYCATNDWWGHWGQWGQGTLVTVSSGGSSRSSSSGGGGSGGGGEIVLTQSPATLSLSPGERATLSCRASQSVSSSYLAWYQQKPGQAPRLLIYGASSRATGIPARFSGSGSGTDFTLTISRLEPEDFAVYYCQVWDSQSNSWVFGQGTKVEIK

SEQ ID NO: 4298 - protein, 247 aa, synthetic construct
QVQLVESGGGVVQPGRSLRLSCAASGFTFSSYAMHWVRQAPGKGLEWVAVISYDGSNKYYADSVKGRFTISRDNSKNTLYLQMNSLRAEDTAVYYCATYDVLTGFEYWGQWGQGTLVTVSSGGSSRSSSSGGGGSGGGGEIVLTQSPATLSLSPGERATLSCRASQSVSSSYLAWYQQKPGQAPRLLIYGASSRATGIPARFSGSGSGTDFTLTISRLEPEDFAVYYCQTWGTGIRVFGQGTKVEIK

SEQ ID NO: 4299 - protein, 249 aa, synthetic construct
QVQLVESGGGVVQPGRSLRLSCAASGFTFSSYAMHWVRQAPGKGLEWVAVISYDGSNKYYADSVKGRFTISRDNSKNTLYLQMNSLRAEDTAVYYCATYLGGIVGASDYWGQWGQGTLVTVSSGGSSRSSSSGGGGSGGGGEIVLTQSPATLSLSPGERATLSCRASQSVSSSYLAWYQQKPGQAPRLLIYGASSRATGIPARFSGSGSGTDFTLTISRLEPEDFAVYYCQQEYTAPVTFGQGTKVEIK

SEQ ID NO: 4300 - protein, 247 aa, synthetic construct
QVQLVESGGGVVQPGRSLRLSCAASGFTFSSYAMHWVRQAPGKGLEWVAVISYDGSNKYYADSVKGRFTISRDNSKNTLYLQMNSLRAEDTAVYYCSGGELARGFDPWGQWGQGTLVTVSSGGSSRSSSSGGGGSGGGGEIVLTQSPATLSLSPGERATLSCRASQSVSSSYLAWYQQKPGQAPRLLIYGASSRATGIPARFSGSGSGTDFTLTISRLEPEDFAVYYCQQSVTIPRTFGQGTKVEIK

SEQ ID NO: 4301 - protein, 250 aa, synthetic construct
QVQLVESGGGVVQPGRSLRLSCAASGFTFSSYAMHWVRQAPGKGLEWVAVISYDGSNKYYADSVKGRFTISRDNSKNTLYLQMNSLRAEDTAVYYCVRHSGWLFPSAFDVWGQWGQGTLVTVSSGGSSRSSSSGGGGSGGGGEIVLTQSPATLSLSPGERATLSCRASQSVSSSYLAWYQQKPGQAPRLLIYGASSRATGIPARFSGSGSGTDFTLTISRLEPEDFAVYYCQNWGTGVGGFGQGTKVEIK

SEQ ID NO: 4302 - protein, 251 aa, synthetic construct; identical to SEQ ID NO: 4200

SEQ ID NO: 4303 - protein, 243 aa, synthetic construct; identical to SEQ ID NO: 4201

SEQ ID NO: 4304 - protein, 245 aa, synthetic construct; identical to SEQ ID NO: 4202

SEQ ID NO: 4305 - protein, 254 aa, synthetic construct; identical to SEQ ID NO: 4203

SEQ ID NO: 4306 - protein, 249 aa, synthetic construct; identical to SEQ ID NO: 4204

SEQ ID NO: 4307 - protein, 248 aa, synthetic construct; identical to SEQ ID NO: 4205

SEQ ID NO: 4308 - protein, 254 aa, synthetic construct; identical to SEQ ID NO: 4206

SEQ ID NO: 4309 - protein, 248 aa, synthetic construct; identical to SEQ ID NO: 4207

SEQ ID NO: 4310 - protein, 252 aa, synthetic construct; identical to SEQ ID NO: 4208

SEQ ID NO: 4311 - protein, 252 aa, synthetic construct; identical to SEQ ID NO: 4209

SEQ ID NO: 4312 - protein, 252 aa, synthetic construct; identical to SEQ ID NO: 4210

SEQ ID NO: 4313 - protein, 252 aa, synthetic construct; identical to SEQ ID NO: 4211

SEQ ID NO: 4314 - protein, 252 aa, synthetic construct; identical to SEQ ID NO: 4212

SEQ ID NO: 4315 - protein, 252 aa, synthetic construct; identical to SEQ ID NO: 4213

SEQ ID NO: 4316 - protein, 252 aa, synthetic construct; identical to SEQ ID NO: 4214

SEQ ID NO: 4317 - protein, 247 aa, synthetic construct; identical to SEQ ID NO: 4215

SEQ ID NO: 4318 - protein, 247 aa, synthetic construct; identical to SEQ ID NO: 4216

SEQ ID NO: 4319 - protein, 247 aa, synthetic construct; identical to SEQ ID NO: 4217

SEQ ID NO: 4320 - protein, 247 aa, synthetic construct; identical to SEQ ID NO: 4218

SEQ ID NO: 4321 - protein, 250 aa, synthetic construct; identical to SEQ ID NO: 4219

SEQ ID NO: 4322 - protein, 247 aa, synthetic construct; identical to SEQ ID NO: 4220

SEQ ID NO: 4323 - protein, 248 aa, synthetic construct; identical to SEQ ID NO: 4221

SEQ ID NO: 4324 - protein, 250 aa, synthetic construct; identical to SEQ ID NO: 4222

SEQ ID NO: 4325 - protein, 247 aa, synthetic construct; identical to SEQ ID NO: 4223

SEQ ID NO: 4326 - protein, 248 aa, synthetic construct; identical to SEQ ID NO: 4225

SEQ ID NO: 4327 - protein, 248 aa, synthetic construct; identical to SEQ ID NO: 4226

SEQ ID NO: 4328 - protein, 248 aa, synthetic construct; identical to SEQ ID NO: 4227

SEQ ID NO: 4329 - protein, 246 aa, synthetic construct; identical to SEQ ID NO: 4228

SEQ ID NO: 4330 - protein, 257 aa, synthetic construct; identical to SEQ ID NO: 4230

SEQ ID NO: 4331 - protein, 258 aa, synthetic construct; identical to SEQ ID NO: 4231

SEQ ID NO: 4332 - protein, 257 aa, synthetic construct; identical to SEQ ID NO: 4232

SEQ ID NO: 4333 - protein, 259 aa, synthetic construct; identical to SEQ ID NO: 4233

SEQ ID NO: 4334 - protein, 260 aa, synthetic construct; identical to SEQ ID NO: 4234

SEQ ID NO: 4335 - protein, 257 aa, synthetic construct; identical to SEQ ID NO: 4235

SEQ ID NO: 4336 - protein, 249 aa, synthetic construct; identical to SEQ ID NO: 4236

SEQ ID NO: 4337 - protein, 249 aa, synthetic construct; identical to SEQ ID NO: 4237

SEQ ID NO: 4338 - protein, 251 aa, synthetic construct; identical to SEQ ID NO: 4238

SEQ ID NO: 4339 - protein, 251 aa, synthetic construct; identical to SEQ ID NO: 4239

SEQ ID NO: 4340 - protein, 249 aa, synthetic construct; identical to SEQ ID NO: 4240

SEQ ID NO: 4341 - protein, 252 aa, synthetic construct; identical to SEQ ID NO: 4241

SEQ ID NO: 4342 - protein, 247 aa, synthetic construct; identical to SEQ ID NO: 4242

SEQ ID NO: 4343 - protein, 250 aa, synthetic construct; identical to SEQ ID NO: 4243

SEQ ID NO: 4344 - protein, 247 aa, synthetic construct; identical to SEQ ID NO: 4244

SEQ ID NO: 4345 - protein, 249 aa, synthetic construct; identical to SEQ ID NO: 4246

SEQ ID NO: 4346 - protein, 249 aa, synthetic construct; identical to SEQ ID NO: 4247

SEQ ID NO: 4347 - protein, 250 aa, synthetic construct; identical to SEQ ID NO: 4248

SEQ ID NO: 4348 - protein, 256 aa, synthetic construct; identical to SEQ ID NO: 4249

SEQ ID NO: 4349 - protein, 256 aa, synthetic construct; identical to SEQ ID NO: 4250

SEQ ID NO: 4350 - protein, 254 aa, synthetic construct; identical to SEQ ID NO: 4251

SEQ ID NO: 4351 - protein, 250 aa, synthetic construct; identical to SEQ ID NO: 4252

SEQ ID NO: 4352 - protein, 247 aa, synthetic construct; identical to SEQ ID NO: 4253

SEQ ID NO: 4353 - protein, 257 aa, synthetic construct; identical to SEQ ID NO: 4254

SEQ ID NO: 4354 - protein, 249 aa, synthetic construct; identical to SEQ ID NO: 4255

SEQ ID NO: 4355 - protein, 252 aa, synthetic construct; identical to SEQ ID NO: 4256

SEQ ID NO: 4356 - protein, 255 aa, synthetic construct; identical to SEQ ID NO: 4257

SEQ ID NO: 4357 - protein, 247 aa, synthetic construct; identical to SEQ ID NO: 4258

SEQ ID NO: 4358 - protein, 246 aa, synthetic construct; identical to SEQ ID NO: 4259

SEQ ID NO: 4359 - protein, 246 aa, synthetic construct; identical to SEQ ID NO: 4260

SEQ ID NO: 4360 - protein, 246 aa, synthetic construct; identical to SEQ ID NO: 4261

SEQ ID NO: 4361 - protein, 246 aa, synthetic construct; identical to SEQ ID NO: 4262

SEQ ID NO: 4362 - protein, 250 aa, synthetic construct; identical to SEQ ID NO: 4263

SEQ ID NO: 4363 - protein, 250 aa, synthetic construct; identical to SEQ ID NO: 4264

SEQ ID NO: 4364 - protein, 252 aa, synthetic construct; identical to SEQ ID NO: 4265

SEQ ID NO: 4365 - protein, 250 aa, synthetic construct; identical to SEQ ID NO: 4266

SEQ ID NO: 4366 - protein, 250 aa, synthetic construct; identical to SEQ ID NO: 4267

SEQ ID NO: 4367 - protein, 250 aa, synthetic construct; identical to SEQ ID NO: 4268

SEQ ID NO: 4368 - protein, 250 aa, synthetic construct; identical to SEQ ID NO: 4269

SEQ ID NO: 4369 - protein, 250 aa, synthetic construct; identical to SEQ ID NO: 4270

SEQ ID NO: 4370 - protein, 250 aa, synthetic construct; identical to SEQ ID NO: 4271

SEQ ID NO: 4371 - protein, 249 aa, synthetic construct; identical to SEQ ID NO: 4272

SEQ ID NO: 4372 - protein, 245 aa, synthetic construct; identical to SEQ ID NO: 4273

SEQ ID NO: 4373 - protein, 252 aa, synthetic construct; identical to SEQ ID NO: 4274

SEQ ID NO: 4374 - protein, 250 aa, synthetic construct; identical to SEQ ID NO: 4275

SEQ ID NO: 4375 - protein, 247 aa, synthetic construct; identical to SEQ ID NO: 4276

SEQ ID NO: 4376 - protein, 248 aa, synthetic construct; identical to SEQ ID NO: 4278

SEQ ID NO: 4377 - protein, 246 aa, synthetic construct; identical to SEQ ID NO: 4279

SEQ ID NO: 4378 - protein, 246 aa, synthetic construct; identical to SEQ ID NO: 4280

SEQ ID NO: 4379 - protein, 250 aa, synthetic construct; identical to SEQ ID NO: 4281

SEQ ID NO: 4380 - protein, 250 aa, synthetic construct; identical to SEQ ID NO: 4283

SEQ ID NO: 4381 - protein, 250 aa, synthetic construct; identical to SEQ ID NO: 4284

SEQ ID NO: 4382 - protein, 250 aa, synthetic construct; identical to SEQ ID NO: 4285

SEQ ID NO: 4383 - protein, 250 aa, synthetic construct; identical to SEQ ID NO: 4286

SEQ ID NO: 4384 - protein, 250 aa, synthetic construct; identical to SEQ ID NO: 4287

SEQ ID NO: 4385 - protein, 250 aa, synthetic construct; identical to SEQ ID NO: 4288

SEQ ID NO: 4386 - protein, 249 aa, synthetic construct; identical to SEQ ID NO: 4289

SEQ ID NO: 4387 - protein, 254 aa, synthetic construct; identical to SEQ ID NO: 4290

SEQ ID NO: 4388 - protein, 254 aa, synthetic construct; identical to SEQ ID NO: 4291

SEQ ID NO: 4389 - protein, 254 aa, synthetic construct; identical to SEQ ID NO: 4292

SEQ ID NO: 4390 - protein, 248 aa, synthetic construct; identical to SEQ ID NO: 4293

SEQ ID NO: 4391 - protein, 248 aa, synthetic construct; identical to SEQ ID NO: 4294

SEQ ID NO: 4392 - protein, 246 aa, synthetic construct; identical to SEQ ID NO: 4295

SEQ ID NO: 4393 - protein, 248 aa, synthetic construct; identical to SEQ ID NO: 4296

SEQ ID NO: 4394 - protein, 246 aa, synthetic construct; identical to SEQ ID NO: 4297

SEQ ID NO: 4395 - protein, 249 aa, synthetic construct; identical to SEQ ID NO: 4299

SEQ ID NO: 4396 - protein, 250 aa, synthetic construct; identical to SEQ ID NO: 4301

SEQ ID NO: 4397 - protein, 253 aa, synthetic construct
QVQLVESGGGVVQPGRSLRLSCAASGFTFSSYAMHWVRQAPGKGLEWVAVISYDGSNKYYADSVKGRFTISRDNSKNTLYLQMNSLRAEDTAVYYCAAAKNGASLGVNLWGQWGQGTLVTVSSGGSSRSSSSGGGGSGGGGEIVLTQSPATLSLSPGERATLSCRASQSVSSSYLAWYQQKPGQAPRLLIYGASSRATGIPARFSGSGSGTDFTLTISRLEPEDFAVYYCQSYDSSLSGSPVVFGQGTKVEIK

SEQ ID NO: 4398 - protein, 245 aa, synthetic construct
QVQLVESGGGVVQPGRSLRLSCAASGFTFSSYAMHWVRQAPGKGLEWVAVISYDGSNKYYADSVKGRFTISRDNSKNTLYLQMNSLRAEDTAVYYCADLQYDYWGQWGQGTLVTVSSGGSSRSSSSGGGGSGGGGEIVLTQSPATLSLSPGERATLSCRASQSVSSSYLAWYQQKPGQAPRLLIYGASSRATGIPARFSGSGSGTDFTLTISRLEPEDFAVYYCAAWDNSLSAVVFGQGTKVEIK

SEQ ID NO: 4399 - protein, 245 aa, synthetic construct
QVQLVESGGGVVQPGRSLRLSCAASGFTFSSYAMHWVRQAPGKGLEWVAVISYDGSNKYYADSVKGRFTISRDNSKNTLYLQMNSLRAEDTAVYYCADLQYDYWGQWGQGTLVTVSSGGSSRSSSSGGGGSGGGGEIVLTQSPATLSLSPGERATLSCRASQSVSSSYLAWYQQKPGQAPRLLIYGASSRATGIPARFSGSGSGTDFTLTISRLEPEDFAVYYCLSWDSSLSAEVFGQGTKVEIK

SEQ ID NO: 4400 - protein, 244 aa, synthetic construct
QVQLVESGGGVVQPGRSLRLSCAASGFTFSSYAMHWVRQAPGKGLEWVAVISYDGSNKYYADSVKGRFTISRDNSKNTLYLQMNSLRAEDTAVYYCADLQYDYWGQWGQGTLVTVSSGGSSRSSSSGGGGSGGGGEIVLTQSPATLSLSPGERATLSCRASQSVSSSYLAWYQQKPGQAPRLLIYGASSRATGIPARFSGSGSGTDFTLTISRLEPEDFAVYYCQAWDSSTRGVFGQGTKVEIK

SEQ ID NO: 4401 - protein, 243 aa, synthetic construct
QVQLVESGGGVVQPGRSLRLSCAASGFTFSSYAMHWVRQAPGKGLEWVAVISYDGSNKYYADSVKGRFTISRDNSKNTLYLQMNSLRAEDTAVYYCADLQYDYWGQWGQGTLVTVSSGGSSRSSSSGGGGSGGGGEIVLTQSPATLSLSPGERATLSCRASQSVSSSYLAWYQQKPGQAPRLLIYGASSRATGIPARFSGSGSGTDFTLTISRLEPEDFAVYYCQQYYSVPWTFGQGTKVEIK

SEQ ID NO: 4402 - protein, 244 aa, synthetic construct
QVQLVESGGGVVQPGRSLRLSCAASGFTFSSYAMHWVRQAPGKGLEWVAVISYDGSNKYYADSVKGRFTISRDNSKNTLYLQMNSLRAEDTAVYYCADLQYDYWGQWGQGTLVTVSSGGSSRSSSSGGGGSGGGGEIVLTQSPATLSLSPGERATLSCRASQSVSSSYLAWYQQKPGQAPRLLIYGASSRATGIPARFSGSGSGTDFTLTISRLEPEDFAVYYCQSWDAGTNRVFGQGTKVEIK

SEQ ID NO: 4403 - protein, 245 aa, synthetic construct
QVQLVESGGGVVQPGRSLRLSCAASGFTFSSYAMHWVRQAPGKGLEWVAVISYDGSNKYYADSVKGRFTISRDNSKNTLYLQMNSLRAEDTAVYYCADLQYDYWGQWGQGTLVTVSSGGSSRSSSSGGGGSGGGGEIVLTQSPATLSLSPGERATLSCRASQSVSSSYLAWYQQKPGQAPRLLIYGASSRATGIPARFSGSGSGTDFTLTISRLEPEDFAVYYCQVWDSSSDHPVFGQGTKVEIK

SEQ ID NO: 4404 - protein, 245 aa, synthetic construct
QVQLVESGGGVVQPGRSLRLSCAASGFTFSSYAMHWVRQAPGKGLEWVAVISYDGSNKYYADSVKGRFTISRDNSKNTLYLQMNSLRAEDTAVYYCADNGPDYWGQWGQGTLVTVSSGGSSRSSSSGGGGSGGGGEIVLTQSPATLSLSPGERATLSCRASQSVSSSYLAWYQQKPGQAPRLLIYGASSRATGIPARFSGSGSGTDFTLTISRLEPEDFAVYYCQVWDSSSDHWVFGQGTKVEIK

SEQ ID NO: 4405 - protein, 247 aa, synthetic construct
QVQLVESGGGVVQPGRSLRLSCAASGFTFSSYAMHWVRQAPGKGLEWVAVISYDGSNKYYADSVKGRFTISRDNSKNTLYLQMNSLRAEDTAVYYCADTAYSLPVDFWGQWGQGTLVTVSSGGSSRSSSSGGGGSGGGGEIVLTQSPATLSLSPGERATLSCRASQSVSSSYLAWYQQKPGQAPRLLIYGASSRATGIPARFSGSGSGTDFTLTISRLEPEDFAVYYCQHYDNWPPTFGQGTKVEIK

SEQ ID NO: 4406 - protein, 249 aa, synthetic construct
QVQLVESGGGVVQPGRSLRLSCAASGFTFSSYAMHWVRQAPGKGLEWVAVISYDGSNKYYADSVKGRFTISRDNSKNTLYLQMNSLRAEDTAVYYCAGDSSSSMPYFDYWGQWGQGTLVTVSSGGSSRSSSSGGGGSGGGGEIVLTQSPATLSLSPGERATLSCRASQSVSSSYLAWYQQKPGQAPRLLIYGASSRATGIPARFSGSGSGTDFTLTISRLEPEDFAVYYCQQDGTPPRTFGQGTKVEIK

SEQ ID NO: 4407 - protein, 247 aa, synthetic construct
QVQLVESGGGVVQPGRSLRLSCAASGFTFSSYAMHWVRQAPGKGLEWVAVISYDGSNKYYADSVKGRFTISRDNSKNTLYLQMNSLRAEDTAVYYCAGGGNYGQFDYWGQWGQGTLVTVSSGGSSRSSSSGGGGSGGGGEIVLTQSPATLSLSPGERATLSCRASQSVSSSYLAWYQQKPGQAPRLLIYGASSRATGIPARFSGSGSGTDFTLTISRLEPEDFAVYYCQQADSPPITFGQGTKVEIK

SEQ ID NO: 4408 - protein, 247 aa, synthetic construct
QVQLVESGGGVVQPGRSLRLSCAASGFTFSSYAMHWVRQAPGKGLEWVAVISYDGSNKYYADSVKGRFTISRDNSKNTLYLQMNSLRAEDTAVYYCAGGGNYGQFDYWGQWGQGTLVTVSSGGSSRSSSSGGGGSGGGGEIVLTQSPATLSLSPGERATLSCRASQSVSSSYLAWYQQKPGQAPRLLIYGASSRATGIPARFSGSGSGTDFTLTISRLEPEDFAVYYCQQANSPPITFGQGTKVEIK

SEQ ID NO: 4409 - protein, 247 aa, synthetic construct
QVQLVESGGGVVQPGRSLRLSCAASGFTFSSYAMHWVRQAPGKGLEWVAVISYDGSNKYYADSVKGRFTISRDNSKNTLYLQMNSLRAEDTAVYYCAGGGNYGQFDYWGQWGQGTLVTVSSGGSSRSSSSGGGGSGGGGEIVLTQSPATLSLSPGERATLSCRASQSVSSSYLAWYQQKPGQAPRLLIYGASSRATGIPARFSGSGSGTDFTLTISRLEPEDFAVYYCQQSYSPPITFGQGTKVEIK

SEQ ID NO: 4410 - protein, 245 aa, synthetic construct
QVQLVESGGGVVQPGRSLRLSCAASGFTFSSYAMHWVRQAPGKGLEWVAVISYDGSNKYYADSVKGRFTISRDNSKNTLYLQMNSLRAEDTAVYYCAGVGRIFPYWGQWGQGTLVTVSSGGSSRSSSSGGGGSGGGGEIVLTQSPATLSLSPGERATLSCRASQSVSSSYLAWYQQKPGQAPRLLIYGASSRATGIPARFSGSGSGTDFTLTISRLEPEDFAVYYCQQSYSTPFTFGQGTKVEIK

SEQ ID NO: 4411 - protein, 245 aa, synthetic construct
QVQLVESGGGVVQPGRSLRLSCAASGFTFSSYAMHWVRQAPGKGLEWVAVISYDGSNKYYADSVKGRFTISRDNSKNTLYLQMNSLRAEDTAVYYCAGVGRIFPYWGQWGQGTLVTVSSGGSSRSSSSGGGGSGGGGEIVLTQSPATLSLSPGERATLSCRASQSVSSSYLAWYQQKPGQAPRLLIYGASSRATGIPARFSGSGSGTDFTLTISRLEPEDFAVYYCQQTYMTPLTFGQGTKVEIK

SEQ ID NO: 4412 - protein, 254 aa, synthetic construct
QVQLVESGGGVVQPGRSLRLSCAASGFTFSSYAMHWVRQAPGKGLEWVAVISYDGSNKYYADSVKGRFTISRDNSKNTLYLQMNSLRAEDTAVYYCAHRLANYTRVDRYYDYWGQWGQGTLVTVSSGGSSRSSSSGGGGSGGGGEIVLTQSPATLSLSPGERATLSCRASQSVSSSYLAWYQQKPGQAPRLLIYGASSRATGIPARFSGSGSGTDFTLTISRLEPEDFAVYYCQVWHSGDNRWVFGQGTKVEIK

SEQ ID NO: 4413 - protein, 250 aa, synthetic construct
QVQLVESGGGVVQPGRSLRLSCAASGFTFSSYAMHWVRQAPGKGLEWVAVISYDGSNKYYADSVKGRFTISRDNSKNTLYLQMNSLRAEDTAVYYCAHSRSISPYYFDYWGQWGQGTLVTVSSGGSSRSSSSGGGGSGGGGEIVLTQSPATLSLSPGERATLSCRASQSVSSSYLAWYQQKPGQAPRLLIYGASSRATGIPARFSGSGSGTDFTLTISRLEPEDFAVYYCQQYNSYYSGAFGQGTKVEIK

SEQ ID NO: 4414 - protein, 246 aa, synthetic construct
QVQLVESGGGVVQPGRSLRLSCAASGFTFSSYAMHWVRQAPGKGLEWVAVISYDGSNKYYADSVKGRFTISRDNSKNTLYLQMNSLRAEDTAVYYCAKALYGGLDYWGQWGQGTLVTVSSGGSSRSSSSGGGGSGGGGEIVLTQSPATLSLSPGERATLSCRASQSVSSSYLAWYQQKPGQAPRLLIYGASSRATGIPARFSGSGSGTDFTLTISRLEPEDFAVYYCQQSYSTTFTFGQGTKVEIK

SEQ ID NO: 4415 - protein, 253 aa, synthetic construct
QVQLVESGGGVVQPGRSLRLSCAASGFTFSSYAMHWVRQAPGKGLEWVAVISYDGSNKYYADSVKGRFTISRDNSKNTLYLQMNSLRAEDTAVYYCAKAPFWPRSYTYFDYWGQWGQGTLVTVSSGGSSRSSSSGGGGSGGGGEIVLTQSPATLSLSPGERATLSCRASQSVSSSYLAWYQQKPGQAPRLLIYGASSRATGIPARFSGSGSGTDFTLTISRLEPEDFAVYYCQVWDSSHHSRVFGQGTKVEIK

SEQ ID NO: 4416 - protein, 250 aa, synthetic construct
QVQLVESGGGVVQPGRSLRLSCAASGFTFSSYAMHWVRQAPGKGLEWVAVISYDGSNKYYADSVKGRFTISRDNSKNTLYLQMNSLRAEDTAVYYCAKAVALGWAFDRWGQWGQGTLVTVSSGGSSRSSSSGGGGSGGGGEIVLTQSPATLSLSPGERATLSCRASQSVSSSYLAWYQQKPGQAPRLLIYGASSRATGIPARFSGSGSGTDFTLTISRLEPEDFAVYYCGTWDSSLSAGVFGQGTKVEIK

SEQ ID NO: 4417 - protein, 247 aa, synthetic construct
QVQLVESGGGVVQPGRSLRLSCAASGFTFSSYAMHWVRQAPGKGLEWVAVISYDGSNKYYADSVKGRFTISRDNSKNTLYLQMNSLRAEDTAVYYCAKDAPSGYFDYWGQWGQGTLVTVSSGGSSRSSSSGGGGSGGGGEIVLTQSPATLSLSPGERATLSCRASQSVSSSYLAWYQQKPGQAPRLLIYGASSRATGIPARFSGSGSGTDFTLTISRLEPEDFAVYYCQQYNNWPRTFGQGTKVEIK

SEQ ID NO: 4418 - protein, 248 aa, synthetic construct
QVQLVESGGGVVQPGRSLRLSCAASGFTFSSYAMHWVRQAPGKGLEWVAVISYDGSNKYYADSVKGRFTISRDNSKNTLYLQMNSLRAEDTAVYYCAKDFRGGGSFDYWGQWGQGTLVTVSSGGSSRSSSSGGGGSGGGGEIVLTQSPATLSLSPGERATLSCRASQSVSSSYLAWYQQKPGQAPRLLIYGASSRATGIPARFSGSGSGTDFTLTISRLEPEDFAVYYCQQYDNLLWTFGQGTKVEIK

SEQ ID NO: 4419 - protein, 248 aa, synthetic construct
QVQLVESGGGVVQPGRSLRLSCAASGFTFSSYAMHWVRQAPGKGLEWVAVISYDGSNKYYADSVKGRFTISRDNSKNTLYLQMNSLRAEDTAVYYCAKDFRGGGSFDYWGQWGQGTLVTVSSGGSSRSSSSGGGGSGGGGEIVLTQSPATLSLSPGERATLSCRASQSVSSSYLAWYQQKPGQAPRLLIYGASSRATGIPARFSGSGSGTDFTLTISRLEPEDFAVYYCQQYNSYLWTFGQGTKVEIK

SEQ ID NO: 4420 - protein, 251 aa, synthetic construct
QVQLVESGGGVVQPGRSLRLSCAASGFTFSSYAMHWVRQAPGKGLEWVAVISYDGSNKYYADSVKGRFTISRDNSKNTLYLQMNSLRAEDTAVYYCAKDGAVTYGALGDYWGQWGQGTLVTVSSGGSSRSSSSGGGGSGGGGEIVLTQSPATLSLSPGERATLSCRASQSVSSSYLAWYQQKPGQAPRLLIYGASSRATGIPARFSGSGSGTDFTLTISRLEPEDFAVYYCQAWDISSTYVFGQGTKVEIK

SEQ ID NO: 4421 - protein, 246 aa, synthetic construct
QVQLVESGGGVVQPGRSLRLSCAASGFTFSSYAMHWVRQAPGKGLEWVAVISYDGSNKYYADSVKGRFTISRDNSKNTLYLQMNSLRAEDTAVYYCAKDGGAVNFDYWGQWGQGTLVTVSSGGSSRSSSSGGGGSGGGGEIVLTQSPATLSLSPGERATLSCRASQSVSSSYLAWYQQKPGQAPRLLIYGASSRATGIPARFSGSGSGTDFTLTISRLEPEDFAVYYCQTSGTQVVFGQGTKVEIK

SEQ ID NO: 4422 - protein, 248 aa, synthetic construct
QVQLVESGGGVVQPGRSLRLSCAASGFTFSSYAMHWVRQAPGKGLEWVAVISYDGSNKYYADSVKGRFTISRDNSKNTLYLQMNSLRAEDTAVYYCAKDGGGVYTLDYWGQWGQGTLVTVSSGGSSRSSSSGGGGSGGGGEIVLTQSPATLSLSPGERATLSCRASQSVSSSYLAWYQQKPGQAPRLLIYGASSRATGIPARFSGSGSGTDFTLTISRLEPEDFAVYYCLLSYSSVRVFGQGTKVEIK

SEQ ID NO: 4423 - protein, 249 aa, synthetic construct
QVQLVESGGGVVQPGRSLRLSCAASGFTFSSYAMHWVRQAPGKGLEWVAVISYDGSNKYYADSVKGRFTISRDNSKNTLYLQMNSLRAEDTAVYYCAKDGGGVYTLDYWGQWGQGTLVTVSSGGSSRSSSSGGGGSGGGGEIVLTQSPATLSLSPGERATLSCRASQSVSSSYLAWYQQKPGQAPRLLIYGASSRATGIPARFSGSGSGTDFTLTISRLEPEDFAVYYCQQYGSSPAWTFGQGTKVEIK

SEQ ID NO: 4424 - protein, 250 aa, synthetic construct
QVQLVESGGGVVQPGRSLRLSCAASGFTFSSYAMHWVRQAPGKGLEWVAVISYDGSNKYYADSVKGRFTISRDNSKNTLYLQMNSLRAEDTAVYYCAKDGGGVYTLDYWGQWGQGTLVTVSSGGSSRSSSSGGGGSGGGGEIVLTQSPATLSLSPGERATLSCRASQSVSSSYLAWYQQKPGQAPRLLIYGASSRATGIPARFSGSGSGTDFTLTISRLEPEDFAVYYCQSYDSGLRGKVFGQGTKVEIK

SEQ ID NO: 4425 - protein, 250 aa, synthetic construct
QVQLVESGGGVVQPGRSLRLSCAASGFTFSSYAMHWVRQAPGKGLEWVAVISYDGSNKYYADSVKGRFTISRDNSKNTLYLQMNSLRAEDTAVYYCAKDGGGVYTLDYWGQWGQGTLVTVSSGGSSRSSSSGGGGSGGGGEIVLTQSPATLSLSPGERATLSCRASQSVSSSYLAWYQQKPGQAPRLLIYGASSRATGIPARFSGSGSGTDFTLTISRLEPEDFAVYYCQSYDSSRSGYVFGQGTKVEIK

SEQ ID NO: 4426 - protein, 251 aa, synthetic construct
QVQLVESGGGVVQPGRSLRLSCAASGFTFSSYAMHWVRQAPGKGLEWVAVISYDGSNKYYADSVKGRFTISRDNSKNTLYLQMNSLRAEDTAVYYCAKDGGGVYTLDYWGQWGQGTLVTVSSGGSSRSSSSGGGGSGGGGEIVLTQSPATLSLSPGERATLSCRASQSVSSSYLAWYQQKPGQAPRLLIYGASSRATGIPARFSGSGSGTDFTLTISRLEPEDFAVYYCQVWDNSSDPHYVFGQGTKVEIK

SEQ ID NO: 4427 - protein, 260 aa, synthetic construct
QVQLVESGGGVVQPGRSLRLSCAASGFTFSSYAMHWVRQAPGKGLEWVAVISYDGSNKYYADSVKGRFTISRDNSKNTLYLQMNSLRAEDTAVYYCAKDGGLYRYFYYYKVGDAFDYWGQWGQGTLVTVSSGGSSRSSSSGGGGSGGGGEIVLTQSPATLSLSPGERATLSCRASQSVSSSYLAWYQQKPGQAPRLLIYGASSRATGIPARFSGSGSGTDFTLTISRLEPEDFAVYYCQSADSSGTYPWVFGQGTKVEIK

SEQ ID NO: 4428 - protein, 256 aa, synthetic construct
QVQLVESGGGVVQPGRSLRLSCAASGFTFSSYAMHWVRQAPGKGLEWVAVISYDGSNKYYADSVKGRFTISRDNSKNTLYLQMNSLRAEDTAVYYCAKDGHWYRGYYGSYYLDYWGQWGQGTLVTVSSGGSSRSSSSGGGGSGGGGEIVLTQSPATLSLSPGERATLSCRASQSVSSSYLAWYQQKPGQAPRLLIYGASSRATGIPARFSGSGSGTDFTLTISRLEPEDFAVYYCAAWDDSLIDPVFGQGTKVEIK

SEQ ID NO: 4429 - protein, 256 aa, synthetic construct
QVQLVESGGGVVQPGRSLRLSCAASGFTFSSYAMHWVRQAPGKGLEWVAVISYDGSNKYYADSVKGRFTISRDNSKNTLYLQMNSLRAEDTAVYYCAKDGHWYRGYYGSYYLDYWGQWGQGTLVTVSSGGSSRSSSSGGGGSGGGGEIVLTQSPATLSLSPGERATLSCRASQSVSSSYLAWYQQKPGQAPRLLIYGASSRATGIPARFSGSGSGTDFTLTISRLEPEDFAVYYCAAWDDSLNAVVFGQGTKVEIK

SEQ ID NO: 4430 - protein, 256 aa, synthetic construct
QVQLVESGGGVVQPGRSLRLSCAASGFTFSSYAMHWVRQAPGKGLEWVAVISYDGSNKYYADSVKGRFTISRDNSKNTLYLQMNSLRAEDTAVYYCAKDGHWYRGYYGSYYLDYWGQWGQGTLVTVSSGGSSRSSSSGGGGSGGGGEIVLTQSPATLSLSPGERATLSCRASQSVSSSYLAWYQQKPGQAPRLLIYGASSRATGIPARFSGSGSGTDFTLTISRLEPEDFAVYYCAAWDDSPNGRVFGQGTKVEIK

SEQ ID NO: 4431 - protein, 256 aa, synthetic construct
QVQLVESGGGVVQPGRSLRLSCAASGFTFSSYAMHWVRQAPGKGLEWVAVISYDGSNKYYADSVKGRFTISRDNSKNTLYLQMNSLRAEDTAVYYCAKDGHWYRGYYGSYYLDYWGQWGQGTLVTVSSGGSSRSSSSGGGGSGGGGEIVLTQSPATLSLSPGERATLSCRASQSVSSSYLAWYQQKPGQAPRLLIYGASSRATGIPARFSGSGSGTDFTLTISRLEPEDFAVYYCAGWDDSLSGWVFGQGTKVEIK

SEQ ID NO: 4432 - protein, 256 aa, synthetic construct
QVQLVESGGGVVQPGRSLRLSCAASGFTFSSYAMHWVRQAPGKGLEWVAVISYDGSNKYYADSVKGRFTISRDNSKNTLYLQMNSLRAEDTAVYYCAKDGHWYRGYYGSYYLDYWGQWGQGTLVTVSSGGSSRSSSSGGGGSGGGGEIVLTQSPATLSLSPGERATLSCRASQSVSSSYLAWYQQKPGQAPRLLIYGASSRATGIPARFSGSGSGTDFTLTISRLEPEDFAVYYCASWDDSLNGRVFGQGTKVEIK

SEQ ID NO: 4433 - protein, 256 aa, synthetic construct
QVQLVESGGGVVQPGRSLRLSCAASGFTFSSYAMHWVRQAPGKGLEWVAVISYDGSNKYYADSVKGRFTISRDNSKNTLYLQMNSLRAEDTAVYYCAKDGHWYRGYYGSYYLDYWGQWGQGTLVTVSSGGSSRSSSSGGGGSGGGGEIVLTQSPATLSLSPGERATLSCRASQSVSSSYLAWYQQKPGQAPRLLIYGASSRATGIPARFSGSGSGTDFTLTISRLEPEDFAVYYCGVWDSSVGGWVFGQGTKVEIK

SEQ ID NO: 4434 - protein, 254 aa, synthetic construct
QVQLVESGGGVVQPGRSLRLSCAASGFTFSSYAMHWVRQAPGKGLEWVAVISYDGSNKYYADSVKGRFTISRDNSKNTLYLQMNSLRAEDTAVYYCAKDGHWYRGYYGSYYLDYWGQWGQGTLVTVSSGGSSRSSSSGGGGSGGGGEIVLTQSPATLSLSPGERATLSCRASQSVSSSYLAWYQQKPGQAPRLLIYGASSRATGIPARFSGSGSGTDFTLTISRLEPEDFAVYYCQAWDSNTAVFGQGTKVEIK

SEQ ID NO: 4435 - protein, 254 aa, synthetic construct
QVQLVESGGGVVQPGRSLRLSCAASGFTFSSYAMHWVRQAPGKGLEWVAVISYDGSNKYYADSVKGRFTISRDNSKNTLYLQMNSLRAEDTAVYYCAKDGHWYRGYYGSYYLDYWGQWGQGTLVTVSSGGSSRSSSSGGGGSGGGGEIVLTQSPATLSLSPGERATLSCRASQSVSSSYLAWYQQKPGQAPRLLIYGASSRATGIPARFSGSGSGTDFTLTISRLEPEDFAVYYCQQSYSPPPTFGQGTKVEIK

SEQ ID NO: 4436 - protein, 257 aa, synthetic construct
QVQLVESGGGVVQPGRSLRLSCAASGFTFSSYAMHWVRQAPGKGLEWVAVISYDGSNKYYADSVKGRFTISRDNSKNTLYLQMNSLRAEDTAVYYCAKDGHWYRGYYGSYYLDYWGQWGQGTLVTVSSGGSSRSSSSGGGGSGGGGEIVLTQSPATLSLSPGERATLSCRASQSVSSSYLAWYQQKPGQAPRLLIYGASSRATGIPARFSGSGSGTDFTLTISRLEPEDFAVYYCQSYDSSLLPGVVFGQGTKVEIK

SEQ ID NO: 4437 - protein, 254 aa, synthetic construct
QVQLVESGGGVVQPGRSLRLSCAASGFTFSSYAMHWVRQAPGKGLEWVAVISYDGSNKYYADSVKGRFTISRDNSKNTLYLQMNSLRAEDTAVYYCAKDGHWYRGYYGSYYLDYWGQWGQGTLVTVSSGGSSRSSSSGGGGSGGGGEIVLTQSPATLSLSPGERATLSCRASQSVSSSYLAWYQQKPGQAPRLLIYGASSRATGIPARFSGSGSGTDFTLTISRLEPEDFAVYYCQTWDSFGQVFGQGTKVEIK

SEQ ID NO: 4438 - protein, 249 aa, synthetic construct
QVQLVESGGGVVQPGRSLRLSCAASGFTFSSYAMHWVRQAPGKGLEWVAVISYDGSNKYYADSVKGRFTISRDNSKNTLYLQMNSLRAEDTAVYYCAKDGRSAAIDYWGQWGQGTLVTVSSGGSSRSSSSGGGGSGGGGEIVLTQSPATLSLSPGERATLSCRASQSVSSSYLAWYQQKPGQAPRLLIYGASSRATGIPARFSGSGSGTDFTLTISRLEPEDFAVYYCSSYTSSSSLVVFGQGTKVEIK

SEQ ID NO: 4439 - protein, 255 aa, synthetic construct
QVQLVESGGGVVQPGRSLRLSCAASGFTFSSYAMHWVRQAPGKGLEWVAVISYDGSNKYYADSVKGRFTISRDNSKNTLYLQMNSLRAEDTAVYYCAKDHSAYRGGFYSYTFDYWGQWGQGTLVTVSSGGSSRSSSSGGGGSGGGGEIVLTQSPATLSLSPGERATLSCRASQSVSSSYLAWYQQKPGQAPRLLIYGASSRATGIPARFSGSGSGTDFTLTISRLEPEDFAVYYCQAWDSTDHVVFGQGTKVEIK

SEQ ID NO: 4440 - protein, 250 aa, synthetic construct
QVQLVESGGGVVQPGRSLRLSCAASGFTFSSYAMHWVRQAPGKGLEWVAVISYDGSNKYYADSVKGRFTISRDNSKNTLYLQMNSLRAEDTAVYYCAKDHTMLGSFDYWGQWGQGTLVTVSSGGSSRSSSSGGGGSGGGGEIVLTQSPATLSLSPGERATLSCRASQSVSSSYLAWYQQKPGQAPRLLIYGASSRATGIPARFSGSGSGTDFTLTISRLEPEDFAVYYCGTWDSSRGSGVFGQGTKVEIK

SEQ ID NO: 4441 - protein, 250 aa, synthetic construct
QVQLVESGGGVVQPGRSLRLSCAASGFTFSSYAMHWVRQAPGKGLEWVAVISYDGSNKYYADSVKGRFTISRDNSKNTLYLQMNSLRAEDTAVYYCAKDHTMLGSFDYWGQWGQGTLVTVSSGGSSRSSSSGGGGSGGGGEIVLTQSPATLSLSPGERATLSCRASQSVSSSYLAWYQQKPGQAPRLLIYGASSRATGIPARFSGSGSGTDFTLTISRLEPEDFAVYYCQQYGSRSPVWSFGQGTKVEIK

SEQ ID NO: 4442 - protein, 249 aa, synthetic construct
QVQLVESGGGVVQPGRSLRLSCAASGFTFSSYAMHWVRQAPGKGLEWVAVISYDGSNKYYADSVKGRFTISRDNSKNTLYLQMNSLRAEDTAVYYCAKDHTMLGSFDYWGQWGQGTLVTVSSGGSSRSSSSGGGGSGGGGEIVLTQSPATLSLSPGERATLSCRASQSVSSSYLAWYQQKPGQAPRLLIYGASSRATGIPARFSGSGSGTDFTLTISRLEPEDFAVYYCSLYYGGGDRLFGQGTKVEIK

SEQ ID NO: 4443 - protein, 248 aa, synthetic construct
QVQLVESGGGVVQPGRSLRLSCAASGFTFSSYAMHWVRQAPGKGLEWVAVISYDGSNKYYADSVKGRFTISRDNSKNTLYLQMNSLRAEDTAVYYCAKDIWYYFDYWGQWGQGTLVTVSSGGSSRSSSSGGGGSGGGGEIVLTQSPATLSLSPGERATLSCRASQSVSSSYLAWYQQKPGQAPRLLIYGASSRATGIPARFSGSGSGTDFTLTISRLEPEDFAVYYCQSWAKSGGNRVFGQGTKVEIK

SEQ ID NO: 4444 - protein, 256 aa, synthetic construct
QVQLVESGGGVVQPGRSLRLSCAASGFTFSSYAMHWVRQAPGKGLEWVAVISYDGSNKYYADSVKGRFTISRDNSKNTLYLQMNSLRAEDTAVYYCAKDLGTGFMQGYWALDYWGQWGQGTLVTVSSGGSSRSSSSGGGGSGGGGEIVLTQSPATLSLSPGERATLSCRASQSVSSSYLAWYQQKPGQAPRLLIYGASSRATGIPARFSGSGSGTDFTLTISRLEPEDFAVYYCNSRDSRGNNLWVFGQGTKVEIK

SEQ ID NO: 4445 - protein, 248 aa, synthetic construct
QVQLVESGGGVVQPGRSLRLSCAASGFTFSSYAMHWVRQAPGKGLEWVAVISYDGSNKYYADSVKGRFTISRDNSKNTLYLQMNSLRAEDTAVYYCAKDLIGSSFDYWGQWGQGTLVTVSSGGSSRSSSSGGGGSGGGGEIVLTQSPATLSLSPGERATLSCRASQSVSSSYLAWYQQKPGQAPRLLIYGASSRATGIPARFSGSGSGTDFTLTISRLEPEDFAVYYCQTWDIGTYVVFGQGTKVEIK

SEQ ID NO: 4446 - protein, 248 aa, synthetic construct
QVQLVESGGGVVQPGRSLRLSCAASGFTFSSYAMHWVRQAPGKGLEWVAVISYDGSNKYYADSVKGRFTISRDNSKNTLYLQMNSLRAEDTAVYYCAKDLIYTAQDYWGQWGQGTLVTVSSGGSSRSSSSGGGGSGGGGEIVLTQSPATLSLSPGERATLSCRASQSVSSSYLAWYQQKPGQAPRLLIYGASSRATGIPARFSGSGSGTDFTLTISRLEPEDFAVYYCQAWDSSPLVVFGQGTKVEIK

SEQ ID NO: 4447 - protein, 248 aa, synthetic construct
QVQLVESGGGVVQPGRSLRLSCAASGFTFSSYAMHWVRQAPGKGLEWVAVISYDGSNKYYADSVKGRFTISRDNSKNTLYLQMNSLRAEDTAVYYCAKDLIYTAQDYWGQWGQGTLVTVSSGGSSRSSSSGGGGSGGGGEIVLTQSPATLSLSPGERATLSCRASQSVSSSYLAWYQQKPGQAPRLLIYGASSRATGIPARFSGSGSGTDFTLTISRLEPEDFAVYYCQAWDSTSLVVFGQGTKVEIK

SEQ ID NO: 4448 - protein, 248 aa, synthetic construct
QVQLVESGGGVVQPGRSLRLSCAASGFTFSSYAMHWVRQAPGKGLEWVAVISYDGSNKYYADSVKGRFTISRDNSKNTLYLQMNSLRAEDTAVYYCAKDLIYTAQDYWGQWGQGTLVTVSSGGSSRSSSSGGGGSGGGGEIVLTQSPATLSLSPGERATLSCRASQSVSSSYLAWYQQKPGQAPRLLIYGASSRATGIPARFSGSGSGTDFTLTISRLEPEDFAVYYCQHFGSSPKLTFGQGTKVEIK

SEQ ID NO: 4449 - protein, 247 aa, synthetic construct
QVQLVESGGGVVQPGRSLRLSCAASGFTFSSYAMHWVRQAPGKGLEWVAVISYDGSNKYYADSVKGRFTISRDNSKNTLYLQMNSLRAEDTAVYYCAKDLIYTAQDYWGQWGQGTLVTVSSGGSSRSSSSGGGGSGGGGEIVLTQSPATLSLSPGERATLSCRASQSVSSSYLAWYQQKPGQAPRLLIYGASSRATGIPARFSGSGSGTDFTLTISRLEPEDFAVYYCQQSYSPPPTFGQGTKVEIK

SEQ ID NO: 4450 - protein, 247 aa, synthetic construct
QVQLVESGGGVVQPGRSLRLSCAASGFTFSSYAMHWVRQAPGKGLEWVAVISYDGSNKYYADSVKGRFTISRDNSKNTLYLQMNSLRAEDTAVYYCAKDLIYTAQDYWGQWGQGTLVTVSSGGSSRSSSSGGGGSGGGGEIVLTQSPATLSLSPGERATLSCRASQSVSSSYLAWYQQKPGQAPRLLIYGASSRATGIPARFSGSGSGTDFTLTISRLEPEDFAVYYCQQYNSFPLTFGQGTKVEIK

SEQ ID NO: 4451 - protein, 249 aa, synthetic construct
QVQLVESGGGVVQPGRSLRLSCAASGFTFSSYAMHWVRQAPGKGLEWVAVISYDGSNKYYADSVKGRFTISRDNSKNTLYLQMNSLRAEDTAVYYCAKDLIYTAQDYWGQWGQGTLVTVSSGGSSRSSSSGGGGSGGGGEIVLTQSPATLSLSPGERATLSCRASQSVSSSYLAWYQQKPGQAPRLLIYGASSRATGIPARFSGSGSGTDFTLTISRLEPEDFAVYYCQSYDSSLSGVVFGQGTKVEIK

SEQ ID NO: 4452 - protein, 250 aa, synthetic construct
QVQLVESGGGVVQPGRSLRLSCAASGFTFSSYAMHWVRQAPGKGLEWVAVISYDGSNKYYADSVKGRFTISRDNSKNTLYLQMNSLRAEDTAVYYCAKDLIYTAQDYWGQWGQGTLVTVSSGGSSRSSSSGGGGSGGGGEIVLTQSPATLSLSPGERATLSCRASQSVSSSYLAWYQQKPGQAPRLLIYGASSRATGIPARFSGSGSGTDFTLTISRLEPEDFAVYYCQSYDSSLSSLVVFGQGTKVEIK

SEQ ID NO: 4453 - protein, 247 aa, synthetic construct
QVQLVESGGGVVQPGRSLRLSCAASGFTFSSYAMHWVRQAPGKGLEWVAVISYDGSNKYYADSVKGRFTISRDNSKNTLYLQMNSLRAEDTAVYYCAKDLIYTAQDYWGQWGQGTLVTVSSGGSSRSSSSGGGGSGGGGEIVLTQSPATLSLSPGERATLSCRASQSVSSSYLAWYQQKPGQAPRLLIYGASSRATGIPARFSGSGSGTDFTLTISRLEPEDFAVYYCQTWDSFGQVFGQGTKVEIK

SEQ ID NO: 4454 - protein, 249 aa, synthetic construct
QVQLVESGGGVVQPGRSLRLSCAASGFTFSSYAMHWVRQAPGKGLEWVAVISYDGSNKYYADSVKGRFTISRDNSKNTLYLQMNSLRAEDTAVYYCAKDLIYTAQDYWGQWGQGTLVTVSSGGSSRSSSSGGGGSGGGGEIVLTQSPATLSLSPGERATLSCRASQSVSSSYLAWYQQKPGQAPRLLIYGASSRATGIPARFSGSGSGTDFTLTISRLEPEDFAVYYCQVWDSSSDQGVFGQGTKVEIK

SEQ ID NO: 4455 - protein, 248 aa, synthetic construct
QVQLVESGGGVVQPGRSLRLSCAASGFTFSSYAMHWVRQAPGKGLEWVAVISYDGSNKYYADSVKGRFTISRDNSKNTLYLQMNSLRAEDTAVYYCAKDLPGTMSFDYWGQWGQGTLVTVSSGGSSRSSSSGGGGSGGGGEIVLTQSPATLSLSPGERATLSCRASQSVSSSYLAWYQQKPGQAPRLLIYGASSRATGIPARFSGSGSGTDFTLTISRLEPEDFAVYYCQQRSNWPWTFGQGTKVEIK

SEQ ID NO: 4456 - protein, 250 aa, synthetic construct
QVQLVESGGGVVQPGRSLRLSCAASGFTFSSYAMHWVRQAPGKGLEWVAVISYDGSNKYYADSVKGRFTISRDNSKNTLYLQMNSLRAEDTAVYYCAKDLRFSGVFDYWGQWGQGTLVTVSSGGSSRSSSSGGGGSGGGGEIVLTQSPATLSLSPGERATLSCRASQSVSSSYLAWYQQKPGQAPRLLIYGASSRATGIPARFSGSGSGTDFTLTISRLEPEDFAVYYCQVWDRSSDQYVFGQGTKVEIK

SEQ ID NO: 4457 - protein, 255 aa, synthetic construct
QVQLVESGGGVVQPGRSLRLSCAASGFTFSSYAMHWVRQAPGKGLEWVAVISYDGSNKYYADSVKGRFTISRDNSKNTLYLQMNSLRAEDTAVYYCAKDLRWNNVNNDSYGMDVWGQWGQGTLVTVSSGGSSRSSSSGGGGSGGGGEIVLTQSPATLSLSPGERATLSCRASQSVSSSYLAWYQQKPGQAPRLLIYGASSRATGIPARFSGSGSGTDFTLTISRLEPEDFAVYYCQAWDSSGAVVFGQGTKVEIK

SEQ ID NO: 4458 - protein, 249 aa, synthetic construct
QVQLVESGGGVVQPGRSLRLSCAASGFTFSSYAMHWVRQAPGKGLEWVAVISYDGSNKYYADSVKGRFTISRDNSKNTLYLQMNSLRAEDTAVYYCAKDLTFARALDYWGQWGQGTLVTVSSGGSSRSSSSGGGGSGGGGEIVLTQSPATLSLSPGERATLSCRASQSVSSSYLAWYQQKPGQAPRLLIYGASSRATGIPARFSGSGSGTDFTLTISRLEPEDFAVYYCETGDSNNLVVFGQGTKVEIK

SEQ ID NO: 4459 - protein, 250 aa, synthetic construct
QVQLVESGGGVVQPGRSLRLSCAASGFTFSSYAMHWVRQAPGKGLEWVAVISYDGSNKYYADSVKGRFTISRDNSKNTLYLQMNSLRAEDTAVYYCAKDLTFARALDYWGQWGQGTLVTVSSGGSSRSSSSGGGGSGGGGEIVLTQSPATLSLSPGERATLSCRASQSVSSSYLAWYQQKPGQAPRLLIYGASSRATGIPARFSGSGSGTDFTLTISRLEPEDFAVYYCQAWDSSSPYVVFGQGTKVEIK

SEQ ID NO: 4460 - protein, 248 aa, synthetic construct
QVQLVESGGGVVQPGRSLRLSCAASGFTFSSYAMHWVRQAPGKGLEWVAVISYDGSNKYYADSVKGRFTISRDNSKNTLYLQMNSLRAEDTAVYYCAKDLTFARALDYWGQWGQGTLVTVSSGGSSRSSSSGGGGSGGGGEIVLTQSPATLSLSPGERATLSCRASQSVSSSYLAWYQQKPGQAPRLLIYGASSRATGIPARFSGSGSGTDFTLTISRLEPEDFAVYYCQAWDTSTWVFGQGTKVEIK

SEQ ID NO: 4461 - protein, 248 aa, synthetic construct
QVQLVESGGGVVQPGRSLRLSCAASGFTFSSYAMHWVRQAPGKGLEWVAVISYDGSNKYYADSVKGRFTISRDNSKNTLYLQMNSLRAEDTAVYYCAKDLTFARALDYWGQWGQGTLVTVSSGGSSRSSSSGGGGSGGGGEIVLTQSPATLSLSPGERATLSCRASQSVSSSYLAWYQQKPGQAPRLLIYGASSRATGIPARFSGSGSGTDFTLTISRLEPEDFAVYYCQQRKNNPRTFGQGTKVEIK

SEQ ID NO: 4462 - protein, 249 aa, synthetic construct
QVQLVESGGGVVQPGRSLRLSCAASGFTFSSYAMHWVRQAPGKGLEWVAVISYDGSNKYYADSVKGRFTISRDNSKNTLYLQMNSLRAEDTAVYYCAKDLTFARALDYWGQWGQGTLVTVSSGGSSRSSSSGGGGSGGGGEIVLTQSPATLSLSPGERATLSCRASQSVSSSYLAWYQQKPGQAPRLLIYGASSRATGIPARFSGSGSGTDFTLTISRLEPEDFAVYYCQQRSNWPPLTFGQGTKVEIK

SEQ ID NO: 4463 - protein, 249 aa, synthetic construct
QVQLVESGGGVVQPGRSLRLSCAASGFTFSSYAMHWVRQAPGKGLEWVAVISYDGSNKYYADSVKGRFTISRDNSKNTLYLQMNSLRAEDTAVYYCAKDLTFARALDYWGQWGQGTLVTVSSGGSSRSSSSGGGGSGGGGEIVLTQSPATLSLSPGERATLSCRASQSVSSSYLAWYQQKPGQAPRLLIYGASSRATGIPARFSGSGSGTDFTLTISRLEPEDFAVYYCQQSSSFSPYTFGQGTKVEIK

SEQ ID NO: 4464 - protein, 248 aa, synthetic construct
QVQLVESGGGVVQPGRSLRLSCAASGFTFSSYAMHWVRQAPGKGLEWVAVISYDGSNKYYADSVKGRFTISRDNSKNTLYLQMNSLRAEDTAVYYCAKDLTFARALDYWGQWGQGTLVTVSSGGSSRSSSSGGGGSGGGGEIVLTQSPATLSLSPGERATLSCRASQSVSSSYLAWYQQKPGQAPRLLIYGASSRATGIPARFSGSGSGTDFTLTISRLEPEDFAVYYCQQSYSPPITFGQGTKVEIK

SEQ ID NO: 4465 - protein, 248 aa, synthetic construct
QVQLVESGGGVVQPGRSLRLSCAASGFTFSSYAMHWVRQAPGKGLEWVAVISYDGSNKYYADSVKGRFTISRDNSKNTLYLQMNSLRAEDTAVYYCAKDLTFARALDYWGQWGQGTLVTVSSGGSSRSSSSGGGGSGGGGEIVLTQSPATLSLSPGERATLSCRASQSVSSSYLAWYQQKPGQAPRLLIYGASSRATGIPARFSGSGSGTDFTLTISRLEPEDFAVYYCQQSYSPPPTFGQGTKVEIK

SEQ ID NO: 4466 - protein, 248 aa, synthetic construct
QVQLVESGGGVVQPGRSLRLSCAASGFTFSSYAMHWVRQAPGKGLEWVAVISYDGSNKYYADSVKGRFTISRDNSKNTLYLQMNSLRAEDTAVYYCAKDLTFARALDYWGQWGQGTLVTVSSGGSSRSSSSGGGGSGGGGEIVLTQSPATLSLSPGERATLSCRASQSVSSSYLAWYQQKPGQAPRLLIYGASSRATGIPARFSGSGSGTDFTLTISRLEPEDFAVYYCQQSYSTLYTFGQGTKVEIK

SEQ ID NO: 4467 - protein, 248 aa, synthetic construct
QVQLVESGGGVVQPGRSLRLSCAASGFTFSSYAMHWVRQAPGKGLEWVAVISYDGSNKYYADSVKGRFTISRDNSKNTLYLQMNSLRAEDTAVYYCAKDLTFARALDYWGQWGQGTLVTVSSGGSSRSSSSGGGGSGGGGEIVLTQSPATLSLSPGERATLSCRASQSVSSSYLAWYQQKPGQAPRLLIYGASSRATGIPARFSGSGSGTDFTLTISRLEPEDFAVYYCQQYDSTLWTFGQGTKVEIK

SEQ ID NO: 4468 - protein, 249 aa, synthetic construct
QVQLVESGGGVVQPGRSLRLSCAASGFTFSSYAMHWVRQAPGKGLEWVAVISYDGSNKYYADSVKGRFTISRDNSKNTLYLQMNSLRAEDTAVYYCAKDLTFARALDYWGQWGQGTLVTVSSGGSSRSSSSGGGGSGGGGEIVLTQSPATLSLSPGERATLSCRASQSVSSSYLAWYQQKPGQAPRLLIYGASSRATGIPARFSGSGSGTDFTLTISRLEPEDFAVYYCQQYGSSPLISFGQGTKVEIK

SEQ ID NO: 4469 - protein, 247 aa, synthetic construct
QVQLVESGGGVVQPGRSLRLSCAASGFTFSSYAMHWVRQAPGKGLEWVAVISYDGSNKYYADSVKGRFTISRDNSKNTLYLQMNSLRAEDTAVYYCAKDLTFARALDYWGQWGQGTLVTVSSGGSSRSSSSGGGGSGGGGEIVLTQSPATLSLSPGERATLSCRASQSVSSSYLAWYQQKPGQAPRLLIYGASSRATGIPARFSGSGSGTDFTLTISRLEPEDFAVYYCQQYNGLRTFGQGTKVEIK

SEQ ID NO: 4470 - protein, 248 aa, synthetic construct
QVQLVESGGGVVQPGRSLRLSCAASGFTFSSYAMHWVRQAPGKGLEWVAVISYDGSNKYYADSVKGRFTISRDNSKNTLYLQMNSLRAEDTAVYYCAKDLTFARALDYWGQWGQGTLVTVSSGGSSRSSSSGGGGSGGGGEIVLTQSPATLSLSPGERATLSCRASQSVSSSYLAWYQQKPGQAPRLLIYGASSRATGIPARFSGSGSGTDFTLTISRLEPEDFAVYYCQQYNSFPLTFGQGTKVEIK

SEQ ID NO: 4471 - protein, 248 aa, synthetic construct
QVQLVESGGGVVQPGRSLRLSCAASGFTFSSYAMHWVRQAPGKGLEWVAVISYDGSNKYYADSVKGRFTISRDNSKNTLYLQMNSLRAEDTAVYYCAKDLTFARALDYWGQWGQGTLVTVSSGGSSRSSSSGGGGSGGGGEIVLTQSPATLSLSPGERATLSCRASQSVSSSYLAWYQQKPGQAPRLLIYGASSRATGIPARFSGSGSGTDFTLTISRLEPEDFAVYYCQTWDSFGQVFGQGTKVEIK

SEQ ID NO: 4472 - protein, 251 aa, synthetic construct
QVQLVESGGGVVQPGRSLRLSCAASGFTFSSYAMHWVRQAPGKGLEWVAVISYDGSNKYYADSVKGRFTISRDNSKNTLYLQMNSLRAEDTAVYYCAKDLTFARALDYWGQWGQGTLVTVSSGGSSRSSSSGGGGSGGGGEIVLTQSPATLSLSPGERATLSCRASQSVSSSYLAWYQQKPGQAPRLLIYGASSRATGIPARFSGSGSGTDFTLTISRLEPEDFAVYYCQVWDSSDSDHVVFGQGTKVEIK

SEQ ID NO: 4473 - protein, 250 aa, synthetic construct
QVQLVESGGGVVQPGRSLRLSCAASGFTFSSYAMHWVRQAPGKGLEWVAVISYDGSNKYYADSVKGRFTISRDNSKNTLYLQMNSLRAEDTAVYYCAKDLTFARALDYWGQWGQGTLVTVSSGGSSRSSSSGGGGSGGGGEIVLTQSPATLSLSPGERATLSCRASQSVSSSYLAWYQQKPGQAPRLLIYGASSRATGIPARFSGSGSGTDFTLTISRLEPEDFAVYYCQVWDSSSGDQVFGQGTKVEIK

SEQ ID NO: 4474 - protein, 249 aa, synthetic construct
QVQLVESGGGVVQPGRSLRLSCAASGFTFSSYAMHWVRQAPGKGLEWVAVISYDGSNKYYADSVKGRFTISRDNSKNTLYLQMNSLRAEDTAVYYCAKDLTFARALDYWGQWGQGTLVTVSSGGSSRSSSSGGGGSGGGGEIVLTQSPATLSLSPGERATLSCRASQSVSSSYLAWYQQKPGQAPRLLIYGASSRATGIPARFSGSGSGTDFTLTISRLEPEDFAVYYCQYYGSYPLYAFGQGTKVEIK

SEQ ID NO: 4475 - protein, 250 aa, synthetic construct
QVQLVESGGGVVQPGRSLRLSCAASGFTFSSYAMHWVRQAPGKGLEWVAVISYDGSNKYYADSVKGRFTISRDNSKNTLYLQMNSLRAEDTAVYYCAKDLTFARALDYWGQWGQGTLVTVSSGGSSRSSSSGGGGSGGGGEIVLTQSPATLSLSPGERATLSCRASQSVSSSYLAWYQQKPGQAPRLLIYGASSRATGIPARFSGSGSGTDFTLTISRLEPEDFAVYYCSSYSGSSTFWVFGQGTKVEIK

SEQ ID NO: 4476 - protein, 247 aa, synthetic construct
QVQLVESGGGVVQPGRSLRLSCAASGFTFSSYAMHWVRQAPGKGLEWVAVISYDGSNKYYADSVKGRFTISRDNSKNTLYLQMNSLRAEDTAVYYCAKDLVTGSLDYWGQWGQGTLVTVSSGGSSRSSSSGGGGSGGGGEIVLTQSPATLSLSPGERATLSCRASQSVSSSYLAWYQQKPGQAPRLLIYGASSRATGIPARFSGSGSGTDFTLTISRLEPEDFAVYYCQQSYITPWTFGQGTKVEIK

SEQ ID NO: 4477 - protein, 247 aa, synthetic construct
QVQLVESGGGVVQPGRSLRLSCAASGFTFSSYAMHWVRQAPGKGLEWVAVISYDGSNKYYADSVKGRFTISRDNSKNTLYLQMNSLRAEDTAVYYCAKDLVVGALDYWGQWGQGTLVTVSSGGSSRSSSSGGGGSGGGGEIVLTQSPATLSLSPGERATLSCRASQSVSSSYLAWYQQKPGQAPRLLIYGASSRATGIPARFSGSGSGTDFTLTISRLEPEDFAVYYCQQANSFPWTFGQGTKVEIK

SEQ ID NO: 4478 - protein, 248 aa, synthetic construct
QVQLVESGGGVVQPGRSLRLSCAASGFTFSSYAMHWVRQAPGKGLEWVAVISYDGSNKYYADSVKGRFTISRDNSKNTLYLQMNSLRAEDTAVYYCAKDLVVGALDYWGQWGQGTLVTVSSGGSSRSSSSGGGGSGGGGEIVLTQSPATLSLSPGERATLSCRASQSVSSSYLAWYQQKPGQAPRLLIYGASSRATGIPARFSGSGSGTDFTLTISRLEPEDFAVYYCQQHKSYPHFTFGQGTKVEIK

SEQ ID NO: 4479 - protein, 246 aa, synthetic construct
QVQLVESGGGVVQPGRSLRLSCAASGFTFSSYAMHWVRQAPGKGLEWVAVISYDGSNKYYADSVKGRFTISRDNSKNTLYLQMNSLRAEDTAVYYCAKDLVVGALDYWGQWGQGTLVTVSSGGSSRSSSSGGGGSGGGGEIVLTQSPATLSLSPGERATLSCRASQSVSSSYLAWYQQKPGQAPRLLIYGASSRATGIPARFSGSGSGTDFTLTISRLEPEDFAVYYCQQYKSHSTFGQGTKVEIK

SEQ ID NO: 4480 - protein, 248 aa, synthetic construct
QVQLVESGGGVVQPGRSLRLSCAASGFTFSSYAMHWVRQAPGKGLEWVAVISYDGSNKYYADSVKGRFTISRDNSKNTLYLQMNSLRAEDTAVYYCAKDLYAISLFDYWGQWGQGTLVTVSSGGSSRSSSSGGGGSGGGGEIVLTQSPATLSLSPGERATLSCRASQSVSSSYLAWYQQKPGQAPRLLIYGASSRATGIPARFSGSGSGTDFTLTISRLEPEDFAVYYCQAWDSRTWVFGQGTKVEIK

SEQ ID NO: 4481 - protein, 256 aa, synthetic construct
QVQLVESGGGVVQPGRSLRLSCAASGFTFSSYAMHWVRQAPGKGLEWVAVISYDGSNKYYADSVKGRFTISRDNSKNTLYLQMNSLRAEDTAVYYCAKDQEGYRAYGYNGMDVWGQWGQGTLVTVSSGGSSRSSSSGGGGSGGGGEIVLTQSPATLSLSPGERATLSCRASQSVSSSYLAWYQQKPGQAPRLLIYGASSRATGIPARFSGSGSGTDFTLTISRLEPEDFAVYYCGTWDSSLSGNWVFGQGTKVEIK

SEQ ID NO: 4482 - protein, 253 aa, synthetic construct
QVQLVESGGGVVQPGRSLRLSCAASGFTFSSYAMHWVRQAPGKGLEWVAVISYDGSNKYYADSVKGRFTISRDNSKNTLYLQMNSLRAEDTAVYYCAKDQEGYRAYGYNGMDVWGQWGQGTLVTVSSGGSSRSSSSGGGGSGGGGEIVLTQSPATLSLSPGERATLSCRASQSVSSSYLAWYQQKPGQAPRLLIYGASSRATGIPARFSGSGSGTDFTLTISRLEPEDFAVYYCMQGAHWPWAFGQGTKVEIK

SEQ ID NO: 4483 - protein, 248 aa, synthetic construct
QVQLVESGGGVVQPGRSLRLSCAASGFTFSSYAMHWVRQAPGKGLEWVAVISYDGSNKYYADSVKGRFTISRDNSKNTLYLQMNSLRAEDTAVYYCAKDRRHTRGTWGQWGQGTLVTVSSGGSSRSSSSGGGGSGGGGEIVLTQSPATLSLSPGERATLSCRASQSVSSSYLAWYQQKPGQAPRLLIYGASSRATGIPARFSGSGSGTDFTLTISRLEPEDFAVYYCTSYTSSSELYAFGQGTKVEIK

SEQ ID NO: 4484 - protein, 250 aa, synthetic construct
QVQLVESGGGVVQPGRSLRLSCAASGFTFSSYAMHWVRQAPGKGLEWVAVISYDGSNKYYADSVKGRFTISRDNSKNTLYLQMNSLRAEDTAVYYCAKDRSVVPTYYFDYWGQWGQGTLVTVSSGGSSRSSSSGGGGSGGGGEIVLTQSPATLSLSPGERATLSCRASQSVSSSYLAWYQQKPGQAPRLLIYGASSRATGIPARFSGSGSGTDFTLTISRLEPEDFAVYYCQQRSNWPPSFGQGTKVEIK

SEQ ID NO: 4485 - protein, 250 aa, synthetic construct
QVQLVESGGGVVQPGRSLRLSCAASGFTFSSYAMHWVRQAPGKGLEWVAVISYDGSNKYYADSVKGRFTISRDNSKNTLYLQMNSLRAEDTAVYYCAKDSGTHGTFDIWGQWGQGTLVTVSSGGSSRSSSSGGGGSGGGGEIVLTQSPATLSLSPGERATLSCRASQSVSSSYLAWYQQKPGQAPRLLIYGASSRATGIPARFSGSGSGTDFTLTISRLEPEDFAVYYCGTLDSILRSWVFGQGTKVEIK

SEQ ID NO: 4486 - protein, 256 aa, synthetic construct
QVQLVESGGGVVQPGRSLRLSCAASGFTFSSYAMHWVRQAPGKGLEWVAVISYDGSNKYYADSVKGRFTISRDNSKNTLYLQMNSLRAEDTAVYYCAKDWGWYRGYGHAGAVDIWGQWGQGTLVTVSSGGSSRSSSSGGGGSGGGGEIVLTQSPATLSLSPGERATLSCRASQSVSSSYLAWYQQKPGQAPRLLIYGASSRATGIPARFSGSGSGTDFTLTISRLEPEDFAVYYCEEWDDSLKGQVFGQGTKVEIK

SEQ ID NO: 4487 - protein, 257 aa, synthetic construct
QVQLVESGGGVVQPGRSLRLSCAASGFTFSSYAMHWVRQAPGKGLEWVAVISYDGSNKYYADSVKGRFTISRDNSKNTLYLQMNSLRAEDTAVYYCAKDWGWYRGYGHAGAVDIWGQWGQGTLVTVSSGGSSRSSSSGGGGSGGGGEIVLTQSPATLSLSPGERATLSCRASQSVSSSYLAWYQQKPGQAPRLLIYGASSRATGIPARFSGSGSGTDFTLTISRLEPEDFAVYYCGTWDSSLLGAGVFGQGTKVEIK

SEQ ID NO: 4488 - protein, 256 aa, synthetic construct
QVQLVESGGGVVQPGRSLRLSCAASGFTFSSYAMHWVRQAPGKGLEWVAVISYDGSNKYYADSVKGRFTISRDNSKNTLYLQMNSLRAEDTAVYYCAKDWGWYRGYGHAGAVDIWGQWGQGTLVTVSSGGSSRSSSSGGGGSGGGGEIVLTQSPATLSLSPGERATLSCRASQSVSSSYLAWYQQKPGQAPRLLIYGASSRATGIPARFSGSGSGTDFTLTISRLEPEDFAVYYCGTWDSSLRAVVFGQGTKVEIK

SEQ ID NO: 4489 - protein, 256 aa, synthetic construct
QVQLVESGGGVVQPGRSLRLSCAASGFTFSSYAMHWVRQAPGKGLEWVAVISYDGSNKYYADSVKGRFTISRDNSKNTLYLQMNSLRAEDTAVYYCAKDWGWYRGYGHAGAVDIWGQWGQGTLVTVSSGGSSRSSSSGGGGSGGGGEIVLTQSPATLSLSPGERATLSCRASQSVSSSYLAWYQQKPGQAPRLLIYGASSRATGIPARFSGSGSGTDFTLTISRLEPEDFAVYYCGVWDSSGAVVVFGQGTKVEIK

SEQ ID NO: 4490 - protein, 254 aa, synthetic construct
QVQLVESGGGVVQPGRSLRLSCAASGFTFSSYAMHWVRQAPGKGLEWVAVISYDGSNKYYADSVKGRFTISRDNSKNTLYLQMNSLRAEDTAVYYCAKDWGWYRGYGHAGAVDIWGQWGQGTLVTVSSGGSSRSSSSGGGGSGGGGEIVLTQSPATLSLSPGERATLSCRASQSVSSSYLAWYQQKPGQAPRLLIYGASSRATGIPARFSGSGSGTDFTLTISRLEPEDFAVYYCLQHNSYPWTFGQGTKVEIK

SEQ ID NO: 4491 - protein, 256 aa, synthetic construct
QVQLVESGGGVVQPGRSLRLSCAASGFTFSSYAMHWVRQAPGKGLEWVAVISYDGSNKYYADSVKGRFTISRDNSKNTLYLQMNSLRAEDTAVYYCAKDWGWYRGYGHAGAVDIWGQWGQGTLVTVSSGGSSRSSSSGGGGSGGGGEIVLTQSPATLSLSPGERATLSCRASQSVSSSYLAWYQQKPGQAPRLLIYGASSRATGIPARFSGSGSGTDFTLTISRLEPEDFAVYYCQAWDSSSDHVVFGQGTKVEIK

SEQ ID NO: 4492 - protein, 256 aa, synthetic construct
QVQLVESGGGVVQPGRSLRLSCAASGFTFSSYAMHWVRQAPGKGLEWVAVISYDGSNKYYADSVKGRFTISRDNSKNTLYLQMNSLRAEDTAVYYCAKDWGWYRGYGHAGAVDIWGQWGQGTLVTVSSGGSSRSSSSGGGGSGGGGEIVLTQSPATLSLSPGERATLSCRASQSVSSSYLAWYQQKPGQAPRLLIYGASSRATGIPARFSGSGSGTDFTLTISRLEPEDFAVYYCQAWDSSTSHVVFGQGTKVEIK

SEQ ID NO: 4493 - protein, 254 aa, synthetic construct
QVQLVESGGGVVQPGRSLRLSCAASGFTFSSYAMHWVRQAPGKGLEWVAVISYDGSNKYYADSVKGRFTISRDNSKNTLYLQMNSLRAEDTAVYYCAKDWGWYRGYGHAGAVDIWGQWGQGTLVTVSSGGSSRSSSSGGGGSGGGGEIVLTQSPATLSLSPGERATLSCRASQSVSSSYLAWYQQKPGQAPRLLIYGASSRATGIPARFSGSGSGTDFTLTISRLEPEDFAVYYCQQSDSNPYSFGQGTKVEIK

SEQ ID NO: 4494 - protein, 254 aa, synthetic construct
QVQLVESGGGVVQPGRSLRLSCAASGFTFSSYAMHWVRQAPGKGLEWVAVISYDGSNKYYADSVKGRFTISRDNSKNTLYLQMNSLRAEDTAVYYCAKDWGWYRGYGHAGAVDIWGQWGQGTLVTVSSGGSSRSSSSGGGGSGGGGEIVLTQSPATLSLSPGERATLSCRASQSVSSSYLAWYQQKPGQAPRLLIYGASSRATGIPARFSGSGSGTDFTLTISRLEPEDFAVYYCQQSYSPPPTFGQGTKVEIK

SEQ ID NO: 4495 - protein, 254 aa, synthetic construct
QVQLVESGGGVVQPGRSLRLSCAASGFTFSSYAMHWVRQAPGKGLEWVAVISYDGSNKYYADSVKGRFTISRDNSKNTLYLQMNSLRAEDTAVYYCAKDWGWYRGYGHAGAVDIWGQWGQGTLVTVSSGGSSRSSSSGGGGSGGGGEIVLTQSPATLSLSPGERATLSCRASQSVSSSYLAWYQQKPGQAPRLLIYGASSRATGIPARFSGSGSGTDFTLTISRLEPEDFAVYYCQQYGSSPRTFGQGTKVEIK

SEQ ID NO: 4496 - protein, 253 aa, synthetic construct
QVQLVESGGGVVQPGRSLRLSCAASGFTFSSYAMHWVRQAPGKGLEWVAVISYDGSNKYYADSVKGRFTISRDNSKNTLYLQMNSLRAEDTAVYYCAKDWGWYRGYGHAGAVDIWGQWGQGTLVTVSSGGSSRSSSSGGGGSGGGGEIVLTQSPATLSLSPGERATLSCRASQSVSSSYLAWYQQKPGQAPRLLIYGASSRATGIPARFSGSGSGTDFTLTISRLEPEDFAVYYCQQYKRPLTFGQGTKVEIK

SEQ ID NO: 4497 - protein, 258 aa, synthetic construct
QVQLVESGGGVVQPGRSLRLSCAASGFTFSSYAMHWVRQAPGKGLEWVAVISYDGSNKYYADSVKGRFTISRDNSKNTLYLQMNSLRAEDTAVYYCAKDWGWYRGYGHAGAVDIWGQWGQGTLVTVSSGGSSRSSSSGGGGSGGGGEIVLTQSPATLSLSPGERATLSCRASQSVSSSYLAWYQQKPGQAPRLLIYGASSRATGIPARFSGSGSGTDFTLTISRLEPEDFAVYYCQVWDSSSSSLPVVFGQGTKVEIK

SEQ ID NO: 4498 - protein, 250 aa, synthetic construct
QVQLVESGGGVVQPGRSLRLSCAASGFTFSSYAMHWVRQAPGKGLEWVAVISYDGSNKYYADSVKGRFTISRDNSKNTLYLQMNSLRAEDTAVYYCAKEMYWQSYLDYWGQWGQGTLVTVSSGGSSRSSSSGGGGSGGGGEIVLTQSPATLSLSPGERATLSCRASQSVSSSYLAWYQQKPGQAPRLLIYGASSRATGIPARFSGSGSGTDFTLTISRLEPEDFAVYYCNAWDSTLRQVVFGQGTKVEIK

SEQ ID NO: 4499 - protein, 253 aa, synthetic construct
QVQLVESGGGVVQPGRSLRLSCAASGFTFSSYAMHWVRQAPGKGLEWVAVISYDGSNKYYADSVKGRFTISRDNSKNTLYLQMNSLRAEDTAVYYCAKERRYAGHSVDYWGQWGQGTLVTVSSGGSSRSSSSGGGGSGGGGEIVLTQSPATLSLSPGERATLSCRASQSVSSSYLAWYQQKPGQAPRLLIYGASSRATGIPARFSGSGSGTDFTLTISRLEPEDFAVYYCGTWDSSLSGLSYVFGQGTKVEIK

SEQ ID NO: 4500 - protein, 253 aa, synthetic construct
QVQLVESGGGVVQPGRSLRLSCAASGFTFSSYAMHWVRQAPGKGLEWVAVISYDGSNKYYADSVKGRFTISRDNSKNTLYLQMNSLRAEDTAVYYCAKESVSGSRLGWFDPWGQWGQGTLVTVSSGGSSRSSSSGGGGSGGGGEIVLTQSPATLSLSPGERATLSCRASQSVSSSYLAWYQQKPGQAPRLLIYGASSRATGIPARFSGSGSGTDFTLTISRLEPEDFAVYYCQVWDSSSDGYVFGQGTKVEIK

SEQ ID NO: 4501 - protein, 250 aa, synthetic construct
QVQLVESGGGVVQPGRSLRLSCAASGFTFSSYAMHWVRQAPGKGLEWVAVISYDGSNKYYADSVKGRFTISRDNSKNTLYLQMNSLRAEDTAVYYCAKETTGIGAFDYWGQWGQGTLVTVSSGGSSRSSSSGGGGSGGGGEIVLTQSPATLSLSPGERATLSCRASQSVSSSYLAWYQQKPGQAPRLLIYGASSRATGIPARFSGSGSGTDFTLTISRLEPEDFAVYYCQAWDSSTASVVFGQGTKVEIK

SEQ ID NO: 4502 - protein, 249 aa, synthetic construct
QVQLVESGGGVVQPGRSLRLSCAASGFTFSSYAMHWVRQAPGKGLEWVAVISYDGSNKYYADSVKGRFTISRDNSKNTLYLQMNSLRAEDTAVYYCAKETTGIGAFDYWGQWGQGTLVTVSSGGSSRSSSSGGGGSGGGGEIVLTQSPATLSLSPGERATLSCRASQSVSSSYLAWYQQKPGQAPRLLIYGASSRATGIPARFSGSGSGTDFTLTISRLEPEDFAVYYCQLWGTGGDLVFGQGTKVEIK

SEQ ID NO: 4503 - protein, 251 aa, synthetic construct
QVQLVESGGGVVQPGRSLRLSCAASGFTFSSYAMHWVRQAPGKGLEWVAVISYDGSNKYYADSVKGRFTISRDNSKNTLYLQMNSLRAEDTAVYYCAKETTGIGAFDYWGQWGQGTLVTVSSGGSSRSSSSGGGGSGGGGEIVLTQSPATLSLSPGERATLSCRASQSVSSSYLAWYQQKPGQAPRLLIYGASSRATGIPARFSGSGSGTDFTLTISRLEPEDFAVYYCSSYSSSSSIAWIFGQGTKVEIK

SEQ ID NO: 4504 - protein, 250 aa, synthetic construct
QVQLVESGGGVVQPGRSLRLSCAASGFTFSSYAMHWVRQAPGKGLEWVAVISYDGSNKYYADSVKGRFTISRDNSKNTLYLQMNSLRAEDTAVYYCAKFNPVGGFDVWGQWGQGTLVTVSSGGSSRSSSSGGGGSGGGGEIVLTQSPATLSLSPGERATLSCRASQSVSSSYLAWYQQKPGQAPRLLIYGASSRATGIPARFSGSGSGTDFTLTISRLEPEDFAVYYCGTWDSSLLSAWVFGQGTKVEIK

SEQ ID NO: 4505 - protein, 249 aa, synthetic construct
QVQLVESGGGVVQPGRSLRLSCAASGFTFSSYAMHWVRQAPGKGLEWVAVISYDGSNKYYADSVKGRFTISRDNSKNTLYLQMNSLRAEDTAVYYCAKGGWAYIFDYWGQWGQGTLVTVSSGGSSRSSSSGGGGSGGGGEIVLTQSPATLSLSPGERATLSCRASQSVSSSYLAWYQQKPGQAPRLLIYGASSRATGIPARFSGSGSGTDFTLTISRLEPEDFAVYYCGTWDSSSSSAVFGQGTKVEIK

SEQ ID NO: 4506 - protein, 252 aa, synthetic construct
QVQLVESGGGVVQPGRSLRLSCAASGFTFSSYAMHWVRQAPGKGLEWVAVISYDGSNKYYADSVKGRFTISRDNSKNTLYLQMNSLRAEDTAVYYCAKGGYGHSGYAFDYWGQWGQGTLVTVSSGGSSRSSSSGGGGSGGGGEIVLTQSPATLSLSPGERATLSCRASQSVSSSYLAWYQQKPGQAPRLLIYGASSRATGIPARFSGSGSGTDFTLTISRLEPEDFAVYYCGTLDSSLSLWVFGQGTKVEIK

SEQ ID NO: 4507 - protein, 250 aa, synthetic construct
QVQLVESGGGVVQPGRSLRLSCAASGFTFSSYAMHWVRQAPGKGLEWVAVISYDGSNKYYADSVKGRFTISRDNSKNTLYLQMNSLRAEDTAVYYCAKGHSSTYVIDYWGQWGQGTLVTVSSGGSSRSSSSGGGGSGGGGEIVLTQSPATLSLSPGERATLSCRASQSVSSSYLAWYQQKPGQAPRLLIYGASSRATGIPARFSGSGSGTDFTLTISRLEPEDFAVYYCQAWDSSTTGYVFGQGTKVEIK

SEQ ID NO: 4508 - protein, 250 aa, synthetic construct
QVQLVESGGGVVQPGRSLRLSCAASGFTFSSYAMHWVRQAPGKGLEWVAVISYDGSNKYYADSVKGRFTISRDNSKNTLYLQMNSLRAEDTAVYYCAKGIPLQYTYGNDRWGQWGQGTLVTVSSGGSSRSSSSGGGGSGGGGEIVLTQSPATLSLSPGERATLSCRASQSVSSSYLAWYQQKPGQAPRLLIYGASSRATGIPARFSGSGSGTDFTLTISRLEPEDFAVYYCQQYHHWPLTFGQGTKVEIK

SEQ ID NO: 4509 - protein, 253 aa, synthetic construct
QVQLVESGGGVVQPGRSLRLSCAASGFTFSSYAMHWVRQAPGKGLEWVAVISYDGSNKYYADSVKGRFTISRDNSKNTLYLQMNSLRAEDTAVYYCAKGLSWAGSYGYVIDYWGQWGQGTLVTVSSGGSSRSSSSGGGGSGGGGEIVLTQSPATLSLSPGERATLSCRASQSVSSSYLAWYQQKPGQAPRLLIYGASSRATGIPARFSGSGSGTDFTLTISRLEPEDFAVYYCQQYYSTPPATFGQGTKVEIK

SEQ ID NO: 4510 - protein, 247 aa, synthetic construct
QVQLVESGGGVVQPGRSLRLSCAASGFTFSSYAMHWVRQAPGKGLEWVAVISYDGSNKYYADSVKGRFTISRDNSKNTLYLQMNSLRAEDTAVYYCAKGLWGAFDYWGQWGQGTLVTVSSGGSSRSSSSGGGGSGGGGEIVLTQSPATLSLSPGERATLSCRASQSVSSSYLAWYQQKPGQAPRLLIYGASSRATGIPARFSGSGSGTDFTLTISRLEPEDFAVYYCQAWDSRTPYVFGQGTKVEIK

SEQ ID NO: 4511 - protein, 249 aa, synthetic construct
QVQLVESGGGVVQPGRSLRLSCAASGFTFSSYAMHWVRQAPGKGLEWVAVISYDGSNKYYADSVKGRFTISRDNSKNTLYLQMNSLRAEDTAVYYCAKGRGWKGLDIWGQWGQGTLVTVSSGGSSRSSSSGGGGSGGGGEIVLTQSPATLSLSPGERATLSCRASQSVSSSYLAWYQQKPGQAPRLLIYGASSRATGIPARFSGSGSGTDFTLTISRLEPEDFAVYYCGSYGSTSGLYVFGQGTKVEIK

SEQ ID NO: 4512 - protein, 248 aa, synthetic construct
QVQLVESGGGVVQPGRSLRLSCAASGFTFSSYAMHWVRQAPGKGLEWVAVISYDGSNKYYADSVKGRFTISRDNSKNTLYLQMNSLRAEDTAVYYCAKGRGWKGLDIWGQWGQGTLVTVSSGGSSRSSSSGGGGSGGGGEIVLTQSPATLSLSPGERATLSCRASQSVSSSYLAWYQQKPGQAPRLLIYGASSRATGIPARFSGSGSGTDFTLTISRLEPEDFAVYYCQAWDSSSLVVFGQGTKVEIK

SEQ ID NO: 4513 - protein, 250 aa, synthetic construct
QVQLVESGGGVVQPGRSLRLSCAASGFTFSSYAMHWVRQAPGKGLEWVAVISYDGSNKYYADSVKGRFTISRDNSKNTLYLQMNSLRAEDTAVYYCAKGRGWKGLDIWGQWGQGTLVTVSSGGSSRSSSSGGGGSGGGGEIVLTQSPATLSLSPGERATLSCRASQSVSSSYLAWYQQKPGQAPRLLIYGASSRATGIPARFSGSGSGTDFTLTISRLEPEDFAVYYCQSYDSSLSSLVVFGQGTKVEIK

SEQ ID NO: 4514 - protein, 251 aa, synthetic construct
QVQLVESGGGVVQPGRSLRLSCAASGFTFSSYAMHWVRQAPGKGLEWVAVISYDGSNKYYADSVKGRFTISRDNSKNTLYLQMNSLRAEDTAVYYCAKGRGWKGLDIWGQWGQGTLVTVSSGGSSRSSSSGGGGSGGGGEIVLTQSPATLSLSPGERATLSCRASQSVSSSYLAWYQQKPGQAPRLLIYGASSRATGIPARFSGSGSGTDFTLTISRLEPEDFAVYYCQSYDSSLSSSLVVFGQGTKVEIK

SEQ ID NO: 4515 - protein, 250 aa, synthetic construct
QVQLVESGGGVVQPGRSLRLSCAASGFTFSSYAMHWVRQAPGKGLEWVAVISYDGSNKYYADSVKGRFTISRDNSKNTLYLQMNSLRAEDTAVYYCAKGRGWKGLDIWGQWGQGTLVTVSSGGSSRSSSSGGGGSGGGGEIVLTQSPATLSLSPGERATLSCRASQSVSSSYLAWYQQKPGQAPRLLIYGASSRATGIPARFSGSGSGTDFTLTISRLEPEDFAVYYCQSYDSSSGPLVVFGQGTKVEIK

SEQ ID NO: 4516 - protein, 250 aa, synthetic construct
QVQLVESGGGVVQPGRSLRLSCAASGFTFSSYAMHWVRQAPGKGLEWVAVISYDGSNKYYADSVKGRFTISRDNSKNTLYLQMNSLRAEDTAVYYCAKGRGWKGLDIWGQWGQGTLVTVSSGGSSRSSSSGGGGSGGGGEIVLTQSPATLSLSPGERATLSCRASQSVSSSYLAWYQQKPGQAPRLLIYGASSRATGIPARFSGSGSGTDFTLTISRLEPEDFAVYYCQVWDSTTDLNYVFGQGTKVEIK

SEQ ID NO: 4517 - protein, 255 aa, synthetic construct
QVQLVESGGGVVQPGRSLRLSCAASGFTFSSYAMHWVRQAPGKGLEWVAVISYDGSNKYYADSVKGRFTISRDNSKNTLYLQMNSLRAEDTAVYYCAKGTQYRAWWSVRGYMDVWGQWGQGTLVTVSSGGSSRSSSSGGGGSGGGGEIVLTQSPATLSLSPGERATLSCRASQSVSSSYLAWYQQKPGQAPRLLIYGASSRATGIPARFSGSGSGTDFTLTISRLEPEDFAVYYCLSYTSTHNWVFGQGTKVEIK

SEQ ID NO: 4518 - protein, 249 aa, synthetic construct
QVQLVESGGGVVQPGRSLRLSCAASGFTFSSYAMHWVRQAPGKGLEWVAVISYDGSNKYYADSVKGRFTISRDNSKNTLYLQMNSLRAEDTAVYYCAKGTTRLGDNWGQWGQGTLVTVSSGGSSRSSSSGGGGSGGGGEIVLTQSPATLSLSPGERATLSCRASQSVSSSYLAWYQQKPGQAPRLLIYGASSRATGIPARFSGSGSGTDFTLTISRLEPEDFAVYYCGTWDSSLGARYVFGQGTKVEIK

SEQ ID NO: 4519 - protein, 249 aa, synthetic construct
QVQLVESGGGVVQPGRSLRLSCAASGFTFSSYAMHWVRQAPGKGLEWVAVISYDGSNKYYADSVKGRFTISRDNSKNTLYLQMNSLRAEDTAVYYCAKGTTRLGDNWGQWGQGTLVTVSSGGSSRSSSSGGGGSGGGGEIVLTQSPATLSLSPGERATLSCRASQSVSSSYLAWYQQKPGQAPRLLIYGASSRATGIPARFSGSGSGTDFTLTISRLEPEDFAVYYCGTWDSSSSPDYVFGQGTKVEIK

SEQ ID NO: 4520 - protein, 252 aa, synthetic construct
QVQLVESGGGVVQPGRSLRLSCAASGFTFSSYAMHWVRQAPGKGLEWVAVISYDGSNKYYADSVKGRFTISRDNSKNTLYLQMNSLRAEDTAVYYCAKGWGYRGDIYGYFDYWGQWGQGTLVTVSSGGSSRSSSSGGGGSGGGGEIVLTQSPATLSLSPGERATLSCRASQSVSSSYLAWYQQKPGQAPRLLIYGASSRATGIPARFSGSGSGTDFTLTISRLEPEDFAVYYCSAYTSSSTVFGQGTKVEIK

SEQ ID NO: 4521 - protein, 249 aa, synthetic construct
QVQLVESGGGVVQPGRSLRLSCAASGFTFSSYAMHWVRQAPGKGLEWVAVISYDGSNKYYADSVKGRFTISRDNSKNTLYLQMNSLRAEDTAVYYCAKGYGPANAFDYWGQWGQGTLVTVSSGGSSRSSSSGGGGSGGGGEIVLTQSPATLSLSPGERATLSCRASQSVSSSYLAWYQQKPGQAPRLLIYGASSRATGIPARFSGSGSGTDFTLTISRLEPEDFAVYYCGTWDSSDHFVFGQGTKVEIK

SEQ ID NO: 4522 - protein, 248 aa, synthetic construct
QVQLVESGGGVVQPGRSLRLSCAASGFTFSSYAMHWVRQAPGKGLEWVAVISYDGSNKYYADSVKGRFTISRDNSKNTLYLQMNSLRAEDTAVYYCAKGYGPANAFDYWGQWGQGTLVTVSSGGSSRSSSSGGGGSGGGGEIVLTQSPATLSLSPGERATLSCRASQSVSSSYLAWYQQKPGQAPRLLIYGASSRATGIPARFSGSGSGTDFTLTISRLEPEDFAVYYCMQGSRWPLAFGQGTKVEIK

SEQ ID NO: 4523 - protein, 248 aa, synthetic construct
QVQLVESGGGVVQPGRSLRLSCAASGFTFSSYAMHWVRQAPGKGLEWVAVISYDGSNKYYADSVKGRFTISRDNSKNTLYLQMNSLRAEDTAVYYCAKGYGPANAFDYWGQWGQGTLVTVSSGGSSRSSSSGGGGSGGGGEIVLTQSPATLSLSPGERATLSCRASQSVSSSYLAWYQQKPGQAPRLLIYGASSRATGIPARFSGSGSGTDFTLTISRLEPEDFAVYYCQQSYSTLYTFGQGTKVEIK

SEQ ID NO: 4524 - protein, 249 aa, synthetic construct
QVQLVESGGGVVQPGRSLRLSCAASGFTFSSYAMHWVRQAPGKGLEWVAVISYDGSNKYYADSVKGRFTISRDNSKNTLYLQMNSLRAEDTAVYYCAKGYGPANAFDYWGQWGQGTLVTVSSGGSSRSSSSGGGGSGGGGEIVLTQSPATLSLSPGERATLSCRASQSVSSSYLAWYQQKPGQAPRLLIYGASSRATGIPARFSGSGSGTDFTLTISRLEPEDFAVYYCQQYNSADPYTFGQGTKVEIK

SEQ ID NO: 4525 - protein, 248 aa, synthetic construct
QVQLVESGGGVVQPGRSLRLSCAASGFTFSSYAMHWVRQAPGKGLEWVAVISYDGSNKYYADSVKGRFTISRDNSKNTLYLQMNSLRAEDTAVYYCAKGYGPANAFDYWGQWGQGTLVTVSSGGSSRSSSSGGGGSGGGGEIVLTQSPATLSLSPGERATLSCRASQSVSSSYLAWYQQKPGQAPRLLIYGASSRATGIPARFSGSGSGTDFTLTISRLEPEDFAVYYCQSWDSNTVMFGQGTKVEIK

SEQ ID NO: 4526 - protein, 253 aa, synthetic construct
QVQLVESGGGVVQPGRSLRLSCAASGFTFSSYAMHWVRQAPGKGLEWVAVISYDGSNKYYADSVKGRFTISRDNSKNTLYLQMNSLRAEDTAVYYCAKHGDVDTMAVPFHSWGQWGQGTLVTVSSGGSSRSSSSGGGGSGGGGEIVLTQSPATLSLSPGERATLSCRASQSVSSSYLAWYQQKPGQAPRLLIYGASSRATGIPARFSGSGSGTDFTLTISRLEPEDFAVYYCGTWDSSLLSYVFGQGTKVEIK

SEQ ID NO: 4527 - protein, 252 aa, synthetic construct
QVQLVESGGGVVQPGRSLRLSCAASGFTFSSYAMHWVRQAPGKGLEWVAVISYDGSNKYYADSVKGRFTISRDNSKNTLYLQMNSLRAEDTAVYYCAKHSPSESWPLDHWGQWGQGTLVTVSSGGSSRSSSSGGGGSGGGGEIVLTQSPATLSLSPGERATLSCRASQSVSSSYLAWYQQKPGQAPRLLIYGASSRATGIPARFSGSGSGTDFTLTISRLEPEDFAVYYCGSWESNVNRFYVFGQGTKVEIK

SEQ ID NO: 4528 - protein, 248 aa, synthetic construct
QVQLVESGGGVVQPGRSLRLSCAASGFTFSSYAMHWVRQAPGKGLEWVAVISYDGSNKYYADSVKGRFTISRDNSKNTLYLQMNSLRAEDTAVYYCAKHTISERPFKPWGQWGQGTLVTVSSGGSSRSSSSGGGGSGGGGEIVLTQSPATLSLSPGERATLSCRASQSVSSSYLAWYQQKPGQAPRLLIYGASSRATGIPARFSGSGSGTDFTLTISRLEPEDFAVYYCQQGNTPGQTFGQGTKVEIK

SEQ ID NO: 4529 - protein, 246 aa, synthetic construct
QVQLVESGGGVVQPGRSLRLSCAASGFTFSSYAMHWVRQAPGKGLEWVAVISYDGSNKYYADSVKGRFTISRDNSKNTLYLQMNSLRAEDTAVYYCAKIWRRYFDYWGQWGQGTLVTVSSGGSSRSSSSGGGGSGGGGEIVLTQSPATLSLSPGERATLSCRASQSVSSSYLAWYQQKPGQAPRLLIYGASSRATGIPARFSGSGSGTDFTLTISRLEPEDFAVYYCQQAYSFPPTFGQGTKVEIK

SEQ ID NO: 4530 - protein, 258 aa, synthetic construct
QVQLVESGGGVVQPGRSLRLSCAASGFTFSSYAMHWVRQAPGKGLEWVAVISYDGSNKYYADSVKGRFTISRDNSKNTLYLQMNSLRAEDTAVYYCAKLRVSRDWSTNYQWNPYFDIWGQWGQGTLVTVSSGGSSRSSSSGGGGSGGGGEIVLTQSPATLSLSPGERATLSCRASQSVSSSYLAWYQQKPGQAPRLLIYGASSRATGIPARFSGSGSGTDFTLTISRLEPEDFAVYYCSSYTSSSTWVFGQGTKVEIK

SEQ ID NO: 4531 - protein, 246 aa, synthetic construct
QVQLVESGGGVVQPGRSLRLSCAASGFTFSSYAMHWVRQAPGKGLEWVAVISYDGSNKYYADSVKGRFTISRDNSKNTLYLQMNSLRAEDTAVYYCAKNYGGSLDNWGQWGQGTLVTVSSGGSSRSSSSGGGGSGGGGEIVLTQSPATLSLSPGERATLSCRASQSVSSSYLAWYQQKPGQAPRLLIYGASSRATGIPARFSGSGSGTDFTLTISRLEPEDFAVYYCMQATWPPQTFGQGTKVEIK

SEQ ID NO: 4532 - protein, 246 aa, synthetic construct
QVQLVESGGGVVQPGRSLRLSCAASGFTFSSYAMHWVRQAPGKGLEWVAVISYDGSNKYYADSVKGRFTISRDNSKNTLYLQMNSLRAEDTAVYYCAKNYGGSLDNWGQWGQGTLVTVSSGGSSRSSSSGGGGSGGGGEIVLTQSPATLSLSPGERATLSCRASQSVSSSYLAWYQQKPGQAPRLLIYGASSRATGIPARFSGSGSGTDFTLTISRLEPEDFAVYYCQQYDNPPPTFGQGTKVEIK

SEQ ID NO: 4533 - protein, 249 aa, synthetic construct
QVQLVESGGGVVQPGRSLRLSCAASGFTFSSYAMHWVRQAPGKGLEWVAVISYDGSNKYYADSVKGRFTISRDNSKNTLYLQMNSLRAEDTAVYYCAKRHDALWAFDYWGQWGQGTLVTVSSGGSSRSSSSGGGGSGGGGEIVLTQSPATLSLSPGERATLSCRASQSVSSSYLAWYQQKPGQAPRLLIYGASSRATGIPARFSGSGSGTDFTLTISRLEPEDFAVYYCGAWDSNHLRIFGQGTKVEIK

SEQ ID NO: 4534 - protein, 249 aa, synthetic construct
QVQLVESGGGVVQPGRSLRLSCAASGFTFSSYAMHWVRQAPGKGLEWVAVISYDGSNKYYADSVKGRFTISRDNSKNTLYLQMNSLRAEDTAVYYCAKRHDALWAFDYWGQWGQGTLVTVSSGGSSRSSSSGGGGSGGGGEIVLTQSPATLSLSPGERATLSCRASQSVSSSYLAWYQQKPGQAPRLLIYGASSRATGIPARFSGSGSGTDFTLTISRLEPEDFAVYYCQQRSNWPPYTFGQGTKVEIK

SEQ ID NO: 4535 - protein, 250 aa, synthetic construct
QVQLVESGGGVVQPGRSLRLSCAASGFTFSSYAMHWVRQAPGKGLEWVAVISYDGSNKYYADSVKGRFTISRDNSKNTLYLQMNSLRAEDTAVYYCAKRHDALWAFDYWGQWGQGTLVTVSSGGSSRSSSSGGGGSGGGGEIVLTQSPATLSLSPGERATLSCRASQSVSSSYLAWYQQKPGQAPRLLIYGASSRATGIPARFSGSGSGTDFTLTISRLEPEDFAVYYCQVWDSSSSHHVFGQGTKVEIK

SEQ ID NO: 4536 - protein, 254 aa, synthetic construct
QVQLVESGGGVVQPGRSLRLSCAASGFTFSSYAMHWVRQAPGKGLEWVAVISYDGSNKYYADSVKGRFTISRDNSKNTLYLQMNSLRAEDTAVYYCAKSGKYRRFGIYPDYMDVWGQWGQGTLVTVSSGGSSRSSSSGGGGSGGGGEIVLTQSPATLSLSPGERATLSCRASQSVSSSYLAWYQQKPGQAPRLLIYGASSRATGIPARFSGSGSGTDFTLTISRLEPEDFAVYYCQQSNILPITFGQGTKVEIK

SEQ ID NO: 4537 - protein, 254 aa, synthetic construct
QVQLVESGGGVVQPGRSLRLSCAASGFTFSSYAMHWVRQAPGKGLEWVAVISYDGSNKYYADSVKGRFTISRDNSKNTLYLQMNSLRAEDTAVYYCAKSGKYRRFGIYPDYMDVWGQWGQGTLVTVSSGGSSRSSSSGGGGSGGGGEIVLTQSPATLSLSPGERATLSCRASQSVSSSYLAWYQQKPGQAPRLLIYGASSRATGIPARFSGSGSGTDFTLTISRLEPEDFAVYYCQQSYSQPITFGQGTKVEIK

SEQ ID NO: 4538 - protein, 255 aa, synthetic construct
QVQLVESGGGVVQPGRSLRLSCAASGFTFSSYAMHWVRQAPGKGLEWVAVISYDGSNKYYADSVKGRFTISRDNSKNTLYLQMNSLRAEDTAVYYCAKSKTYRTGTPPAPAMDYWGQWGQGTLVTVSSGGSSRSSSSGGGGSGGGGEIVLTQSPATLSLSPGERATLSCRASQSVSSSYLAWYQQKPGQAPRLLIYGASSRATGIPARFSGSGSGTDFTLTISRLEPEDFAVYYCSSYISSGTYVFGQGTKVEIK

SEQ ID NO: 4539 - protein, 246 aa, synthetic construct
QVQLVESGGGVVQPGRSLRLSCAASGFTFSSYAMHWVRQAPGKGLEWVAVISYDGSNKYYADSVKGRFTISRDNSKNTLYLQMNSLRAEDTAVYYCAKSLWGGFDYWGQWGQGTLVTVSSGGSSRSSSSGGGGSGGGGEIVLTQSPATLSLSPGERATLSCRASQSVSSSYLAWYQQKPGQAPRLLIYGASSRATGIPARFSGSGSGTDFTLTISRLEPEDFAVYYCQAWDNNSGVFGQGTKVEIK

SEQ ID NO: 4540 - protein, 247 aa, synthetic construct
QVQLVESGGGVVQPGRSLRLSCAASGFTFSSYAMHWVRQAPGKGLEWVAVISYDGSNKYYADSVKGRFTISRDNSKNTLYLQMNSLRAEDTAVYYCAKSLWGGFDYWGQWGQGTLVTVSSGGSSRSSSSGGGGSGGGGEIVLTQSPATLSLSPGERATLSCRASQSVSSSYLAWYQQKPGQAPRLLIYGASSRATGIPARFSGSGSGTDFTLTISRLEPEDFAVYYCQAWDSSSSAVFGQGTKVEIK

SEQ ID NO: 4541 - protein, 246 aa, synthetic construct
QVQLVESGGGVVQPGRSLRLSCAASGFTFSSYAMHWVRQAPGKGLEWVAVISYDGSNKYYADSVKGRFTISRDNSKNTLYLQMNSLRAEDTAVYYCAKSLWGGFDYWGQWGQGTLVTVSSGGSSRSSSSGGGGSGGGGEIVLTQSPATLSLSPGERATLSCRASQSVSSSYLAWYQQKPGQAPRLLIYGASSRATGIPARFSGSGSGTDFTLTISRLEPEDFAVYYCQAWDSSTVVFGQGTKVEIK

SEQ ID NO: 4542 - protein, 248 aa, synthetic construct
QVQLVESGGGVVQPGRSLRLSCAASGFTFSSYAMHWVRQAPGKGLEWVAVISYDGSNKYYADSVKGRFTISRDNSKNTLYLQMNSLRAEDTAVYYCAKSLYGGMDYWGQWGQGTLVTVSSGGSSRSSSSGGGGSGGGGEIVLTQSPATLSLSPGERATLSCRASQSVSSSYLAWYQQKPGQAPRLLIYGASSRATGIPARFSGSGSGTDFTLTISRLEPEDFAVYYCQTWDSRLNSAVFGQGTKVEIK

SEQ ID NO: 4543 - protein, 254 aa, synthetic construct
QVQLVESGGGVVQPGRSLRLSCAASGFTFSSYAMHWVRQAPGKGLEWVAVISYDGSNKYYADSVKGRFTISRDNSKNTLYLQMNSLRAEDTAVYYCAKSSLMVRGDMVPHFDYWGQWGQGTLVTVSSGGSSRSSSSGGGGSGGGGEIVLTQSPATLSLSPGERATLSCRASQSVSSSYLAWYQQKPGQAPRLLIYGASSRATGIPARFSGSGSGTDFTLTISRLEPEDFAVYYCQAWDSSSIVVFGQGTKVEIK

SEQ ID NO: 4544 - protein, 251 aa, synthetic construct
QVQLVESGGGVVQPGRSLRLSCAASGFTFSSYAMHWVRQAPGKGLEWVAVISYDGSNKYYADSVKGRFTISRDNSKNTLYLQMNSLRAEDTAVYYCAKVIPEKVAGLDHWGQWGQGTLVTVSSGGSSRSSSSGGGGSGGGGEIVLTQSPATLSLSPGERATLSCRASQSVSSSYLAWYQQKPGQAPRLLIYGASSRATGIPARFSGSGSGTDFTLTISRLEPEDFAVYYCQLWDDTNTQVLFGQGTKVEIK

SEQ ID NO: 4545 - protein, 251 aa, synthetic construct
QVQLVESGGGVVQPGRSLRLSCAASGFTFSSYAMHWVRQAPGKGLEWVAVISYDGSNKYYADSVKGRFTISRDNSKNTLYLQMNSLRAEDTAVYYCAKVIPEKVAGLDSWGQWGQGTLVTVSSGGSSRSSSSGGGGSGGGGEIVLTQSPATLSLSPGERATLSCRASQSVSSSYLAWYQQKPGQAPRLLIYGASSRATGIPARFSGSGSGTDFTLTISRLEPEDFAVYYCQAWDSSSAHLVFGQGTKVEIK

SEQ ID NO: 4546 - protein, 249 aa, synthetic construct
QVQLVESGGGVVQPGRSLRLSCAASGFTFSSYAMHWVRQAPGKGLEWVAVISYDGSNKYYADSVKGRFTISRDNSKNTLYLQMNSLRAEDTAVYYCAKVSAGVGAFDYWGQWGQGTLVTVSSGGSSRSSSSGGGGSGGGGEIVLTQSPATLSLSPGERATLSCRASQSVSSSYLAWYQQKPGQAPRLLIYGASSRATGIPARFSGSGSGTDFTLTISRLEPEDFAVYYCQSYTHRGVEVFGQGTKVEIK

SEQ ID NO: 4547 - protein, 249 aa, synthetic construct
QVQLVESGGGVVQPGRSLRLSCAASGFTFSSYAMHWVRQAPGKGLEWVAVISYDGSNKYYADSVKGRFTISRDNSKNTLYLQMNSLRAEDTAVYYCAKYSAPGYADYWGQWGQGTLVTVSSGGSSRSSSSGGGGSGGGGEIVLTQSPATLSLSPGERATLSCRASQSVSSSYLAWYQQKPGQAPRLLIYGASSRATGIPARFSGSGSGTDFTLTISRLEPEDFAVYYCSSYTSSSSLGVFGQGTKVEIK

SEQ ID NO: 4548 - protein, 251 aa, synthetic construct
QVQLVESGGGVVQPGRSLRLSCAASGFTFSSYAMHWVRQAPGKGLEWVAVISYDGSNKYYADSVKGRFTISRDNSKNTLYLQMNSLRAEDTAVYYCALGSYWTGPWKDYWGQWGQGTLVTVSSGGSSRSSSSGGGGSGGGGEIVLTQSPATLSLSPGERATLSCRASQSVSSSYLAWYQQKPGQAPRLLIYGASSRATGIPARFSGSGSGTDFTLTISRLEPEDFAVYYCQVWDSSTDQWVFGQGTKVEIK

SEQ ID NO: 4549 - protein, 249 aa, synthetic construct
QVQLVESGGGVVQPGRSLRLSCAASGFTFSSYAMHWVRQAPGKGLEWVAVISYDGSNKYYADSVKGRFTISRDNSKNTLYLQMNSLRAEDTAVYYCANHKPYGFDYWGQWGQGTLVTVSSGGSSRSSSSGGGGSGGGGEIVLTQSPATLSLSPGERATLSCRASQSVSSSYLAWYQQKPGQAPRLLIYGASSRATGIPARFSGSGSGTDFTLTISRLEPEDFAVYYCGTWDSSSSPNVVFGQGTKVEIK

SEQ ID NO: 4550 - protein, 246 aa, synthetic construct
QVQLVESGGGVVQPGRSLRLSCAASGFTFSSYAMHWVRQAPGKGLEWVAVISYDGSNKYYADSVKGRFTISRDNSKNTLYLQMNSLRAEDTAVYYCAPYADYFDYWGQWGQGTLVTVSSGGSSRSSSSGGGGSGGGGEIVLTQSPATLSLSPGERATLSCRASQSVSSSYLAWYQQKPGQAPRLLIYGASSRATGIPARFSGSGSGTDFTLTISRLEPEDFAVYYCQQYNSYSQYSFGQGTKVEIK

SEQ ID NO: 4551 - protein, 247 aa, synthetic construct
QVQLVESGGGVVQPGRSLRLSCAASGFTFSSYAMHWVRQAPGKGLEWVAVISYDGSNKYYADSVKGRFTISRDNSKNTLYLQMNSLRAEDTAVYYCAPYADYFDYWGQWGQGTLVTVSSGGSSRSSSSGGGGSGGGGEIVLTQSPATLSLSPGERATLSCRASQSVSSSYLAWYQQKPGQAPRLLIYGASSRATGIPARFSGSGSGTDFTLTISRLEPEDFAVYYCQSQDSSGDFRVFGQGTKVEIK

SEQ ID NO: 4552 - protein, 247 aa, synthetic construct
QVQLVESGGGVVQPGRSLRLSCAASGFTFSSYAMHWVRQAPGKGLEWVAVISYDGSNKYYADSVKGRFTISRDNSKNTLYLQMNSLRAEDTAVYYCAPYADYFDYWGQWGQGTLVTVSSGGSSRSSSSGGGGSGGGGEIVLTQSPATLSLSPGERATLSCRASQSVSSSYLAWYQQKPGQAPRLLIYGASSRATGIPARFSGSGSGTDFTLTISRLEPEDFAVYYCQVWDSSSDDYVFGQGTKVEIK

SEQ ID NO: 4553 - protein, 247 aa, synthetic construct
QVQLVESGGGVVQPGRSLRLSCAASGFTFSSYAMHWVRQAPGKGLEWVAVISYDGSNKYYADSVKGRFTISRDNSKNTLYLQMNSLRAEDTAVYYCAPYADYFDYWGQWGQGTLVTVSSGGSSRSSSSGGGGSGGGGEIVLTQSPATLSLSPGERATLSCRASQSVSSSYLAWYQQKPGQAPRLLIYGASSRATGIPARFSGSGSGTDFTLTISRLEPEDFAVYYCQVWDSSSDHVVFGQGTKVEIK

SEQ ID NO: 4554 - protein, 246 aa, synthetic construct
QVQLVESGGGVVQPGRSLRLSCAASGFTFSSYAMHWVRQAPGKGLEWVAVISYDGSNKYYADSVKGRFTISRDNSKNTLYLQMNSLRAEDTAVYYCAPYADYFDYWGQWGQGTLVTVSSGGSSRSSSSGGGGSGGGGEIVLTQSPATLSLSPGERATLSCRASQSVSSSYLAWYQQKPGQAPRLLIYGASSRATGIPARFSGSGSGTDFTLTISRLEPEDFAVYYCSSYTSSSTVVFGQGTKVEIK

SEQ ID NO: 4555 - protein, 250 aa, synthetic construct
QVQLVESGGGVVQPGRSLRLSCAASGFTFSSYAMHWVRQAPGKGLEWVAVISYDGSNKYYADSVKGRFTISRDNSKNTLYLQMNSLRAEDTAVYYCARAGGVPRGYAFDYWGQWGQGTLVTVSSGGSSRSSSSGGGGSGGGGEIVLTQSPATLSLSPGERATLSCRASQSVSSSYLAWYQQKPGQAPRLLIYGASSRATGIPARFSGSGSGTDFTLTISRLEPEDFAVYYCQAWDSSTGVFGQGTKVEIK

SEQ ID NO: 4556 - protein, 250 aa, synthetic construct
QVQLVESGGGVVQPGRSLRLSCAASGFTFSSYAMHWVRQAPGKGLEWVAVISYDGSNKYYADSVKGRFTISRDNSKNTLYLQMNSLRAEDTAVYYCARAGRSRGWYGFDLWGQWGQGTLVTVSSGGSSRSSSSGGGGSGGGGEIVLTQSPATLSLSPGERATLSCRASQSVSSSYLAWYQQKPGQAPRLLIYGASSRATGIPARFSGSGSGTDFTLTISRLEPEDFAVYYCQASDSSSVVFGQGTKVEIK

SEQ ID NO: 4557 - protein, 247 aa, synthetic construct
QVQLVESGGGVVQPGRSLRLSCAASGFTFSSYAMHWVRQAPGKGLEWVAVISYDGSNKYYADSVKGRFTISRDNSKNTLYLQMNSLRAEDTAVYYCARAGVGATPDYWGQWGQGTLVTVSSGGSSRSSSSGGGGSGGGGEIVLTQSPATLSLSPGERATLSCRASQSVSSSYLAWYQQKPGQAPRLLIYGASSRATGIPARFSGSGSGTDFTLTISRLEPEDFAVYYCMQALQTPLTFGQGTKVEIK

SEQ ID NO: 4558 - protein, 247 aa, synthetic construct
QVQLVESGGGVVQPGRSLRLSCAASGFTFSSYAMHWVRQAPGKGLEWVAVISYDGSNKYYADSVKGRFTISRDNSKNTLYLQMNSLRAEDTAVYYCARAGVGATPDYWGQWGQGTLVTVSSGGSSRSSSSGGGGSGGGGEIVLTQSPATLSLSPGERATLSCRASQSVSSSYLAWYQQKPGQAPRLLIYGASSRATGIPARFSGSGSGTDFTLTISRLEPEDFAVYYCMQARQSPLTFGQGTKVEIK

SEQ ID NO: 4559 - protein, 248 aa, synthetic construct
QVQLVESGGGVVQPGRSLRLSCAASGFTFSSYAMHWVRQAPGKGLEWVAVISYDGSNKYYADSVKGRFTISRDNSKNTLYLQMNSLRAEDTAVYYCARALTWNYPFDYWGQWGQGTLVTVSSGGSSRSSSSGGGGSGGGGEIVLTQSPATLSLSPGERATLSCRASQSVSSSYLAWYQQKPGQAPRLLIYGASSRATGIPARFSGSGSGTDFTLTISRLEPEDFAVYYCQKYYSAPRTFGQGTKVEIK

SEQ ID NO: 4560 - protein, 254 aa, synthetic construct
QVQLVESGGGVVQPGRSLRLSCAASGFTFSSYAMHWVRQAPGKGLEWVAVISYDGSNKYYADSVKGRFTISRDNSKNTLYLQMNSLRAEDTAVYYCARAQGVLTRESYYGGMDYWGQWGQGTLVTVSSGGSSRSSSSGGGGSGGGGEIVLTQSPATLSLSPGERATLSCRASQSVSSSYLAWYQQKPGQAPRLLIYGASSRATGIPARFSGSGSGTDFTLTISRLEPEDFAVYYCQQENSPPITFGQGTKVEIK

SEQ ID NO: 4561 - protein, 252 aa, synthetic construct
QVQLVESGGGVVQPGRSLRLSCAASGFTFSSYAMHWVRQAPGKGLEWVAVISYDGSNKYYADSVKGRFTISRDNSKNTLYLQMNSLRAEDTAVYYCARARVGATPTHAFDIWGQWGQGTLVTVSSGGSSRSSSSGGGGSGGGGEIVLTQSPATLSLSPGERATLSCRASQSVSSSYLAWYQQKPGQAPRLLIYGASSRATGIPARFSGSGSGTDFTLTISRLEPEDFAVYYCRVWDSSSTWVFGQGTKVEIK

SEQ ID NO: 4562 - protein, 255 aa, synthetic construct
QVQLVESGGGVVQPGRSLRLSCAASGFTFSSYAMHWVRQAPGKGLEWVAVISYDGSNKYYADSVKGRFTISRDNSKNTLYLQMNSLRAEDTAVYYCARATRYFDWQYRYGMDVWGQWGQGTLVTVSSGGSSRSSSSGGGGSGGGGEIVLTQSPATLSLSPGERATLSCRASQSVSSSYLAWYQQKPGQAPRLLIYGASSRATGIPARFSGSGSGTDFTLTISRLEPEDFAVYYCSSYSSTSTPYVFGQGTKVEIK

SEQ ID NO: 4563 - protein, 255 aa, synthetic construct
QVQLVESGGGVVQPGRSLRLSCAASGFTFSSYAMHWVRQAPGKGLEWVAVISYDGSNKYYADSVKGRFTISRDNSKNTLYLQMNSLRAEDTAVYYCARATRYFDWQYRYGMDVWGQWGQGTLVTVSSGGSSRSSSSGGGGSGGGGEIVLTQSPATLSLSPGERATLSCRASQSVSSSYLAWYQQKPGQAPRLLIYGASSRATGIPARFSGSGSGTDFTLTISRLEPEDFAVYYCSSYTSSSSVYVFGQGTKVEIK

SEQ ID NO: 4564 - protein, 253 aa, synthetic construct
QVQLVESGGGVVQPGRSLRLSCAASGFTFSSYAMHWVRQAPGKGLEWVAVISYDGSNKYYADSVKGRFTISRDNSKNTLYLQMNSLRAEDTAVYYCARDAAYGDVVRPAFDYWGQWGQGTLVTVSSGGSSRSSSSGGGGSGGGGEIVLTQSPATLSLSPGERATLSCRASQSVSSSYLAWYQQKPGQAPRLLIYGASSRATGIPARFSGSGSGTDFTLTISRLEPEDFAVYYCDVAVTDGRWVFGQGTKVEIK

SEQ ID NO: 4565 - protein, 253 aa, synthetic construct
QVQLVESGGGVVQPGRSLRLSCAASGFTFSSYAMHWVRQAPGKGLEWVAVISYDGSNKYYADSVKGRFTISRDNSKNTLYLQMNSLRAEDTAVYYCARDAAYGDVVRPAFDYWGQWGQGTLVTVSSGGSSRSSSSGGGGSGGGGEIVLTQSPATLSLSPGERATLSCRASQSVSSSYLAWYQQKPGQAPRLLIYGASSRATGIPARFSGSGSGTDFTLTISRLEPEDFAVYYCQAWDSNPAVVFGQGTKVEIK

SEQ ID NO: 4566 - protein, 253 aa, synthetic construct
QVQLVESGGGVVQPGRSLRLSCAASGFTFSSYAMHWVRQAPGKGLEWVAVISYDGSNKYYADSVKGRFTISRDNSKNTLYLQMNSLRAEDTAVYYCARDAAYGDVVRPAFDYWGQWGQGTLVTVSSGGSSRSSSSGGGGSGGGGEIVLTQSPATLSLSPGERATLSCRASQSVSSSYLAWYQQKPGQAPRLLIYGASSRATGIPARFSGSGSGTDFTLTISRLEPEDFAVYYCSAVGGSARWVFGQGTKVEIK

SEQ ID NO: 4567 - protein, 253 aa, synthetic construct
QVQLVESGGGVVQPGRSLRLSCAASGFTFSSYAMHWVRQAPGKGLEWVAVISYDGSNKYYADSVKGRFTISRDNSKNTLYLQMNSLRAEDTAVYYCARDAFRYDPRGEYGLDYWGQWGQGTLVTVSSGGSSRSSSSGGGGSGGGGEIVLTQSPATLSLSPGERATLSCRASQSVSSSYLAWYQQKPGQAPRLLIYGASSRATGIPARFSGSGSGTDFTLTISRLEPEDFAVYYCQTWGNTHLVFGQGTKVEIK

SEQ ID NO: 4568 - protein, 247 aa, synthetic construct
QVQLVESGGGVVQPGRSLRLSCAASGFTFSSYAMHWVRQAPGKGLEWVAVISYDGSNKYYADSVKGRFTISRDNSKNTLYLQMNSLRAEDTAVYYCARDARYVPDDGWGQWGQGTLVTVSSGGSSRSSSSGGGGSGGGGEIVLTQSPATLSLSPGERATLSCRASQSVSSSYLAWYQQKPGQAPRLLIYGASSRATGIPARFSGSGSGTDFTLTISRLEPEDFAVYYCQAWDSSTYVFGQGTKVEIK

SEQ ID NO: 4569 - protein, 247 aa, synthetic construct
QVQLVESGGGVVQPGRSLRLSCAASGFTFSSYAMHWVRQAPGKGLEWVAVISYDGSNKYYADSVKGRFTISRDNSKNTLYLQMNSLRAEDTAVYYCARDARYVPDDGWGQWGQGTLVTVSSGGSSRSSSSGGGGSGGGGEIVLTQSPATLSLSPGERATLSCRASQSVSSSYLAWYQQKPGQAPRLLIYGASSRATGIPARFSGSGSGTDFTLTISRLEPEDFAVYYCQVGDSSTVLFGQGTKVEIK

SEQ ID NO: 4570 - protein, 253 aa, synthetic construct
QVQLVESGGGVVQPGRSLRLSCAASGFTFSSYAMHWVRQAPGKGLEWVAVISYDGSNKYYADSVKGRFTISRDNSKNTLYLQMNSLRAEDTAVYYCARDDSYRGPLHGYFDYWGQWGQGTLVTVSSGGSSRSSSSGGGGSGGGGEIVLTQSPATLSLSPGERATLSCRASQSVSSSYLAWYQQKPGQAPRLLIYGASSRATGIPARFSGSGSGTDFTLTISRLEPEDFAVYYCQAWDSSTLVVFGQGTKVEIK

SEQ ID NO: 4571 - protein, 252 aa, synthetic construct
QVQLVESGGGVVQPGRSLRLSCAASGFTFSSYAMHWVRQAPGKGLEWVAVISYDGSNKYYADSVKGRFTISRDNSKNTLYLQMNSLRAEDTAVYYCARDDSYRGPLHGYFDYWGQWGQGTLVTVSSGGSSRSSSSGGGGSGGGGEIVLTQSPATLSLSPGERATLSCRASQSVSSSYLAWYQQKPGQAPRLLIYGASSRATGIPARFSGSGSGTDFTLTISRLEPEDFAVYYCQTWDSFGQVFGQGTKVEIK

SEQ ID NO: 4572 - protein, 254 aa, synthetic construct
QVQLVESGGGVVQPGRSLRLSCAASGFTFSSYAMHWVRQAPGKGLEWVAVISYDGSNKYYADSVKGRFTISRDNSKNTLYLQMNSLRAEDTAVYYCARDDSYRGPLHGYFDYWGQWGQGTLVTVSSGGSSRSSSSGGGGSGGGGEIVLTQSPATLSLSPGERATLSCRASQSVSSSYLAWYQQKPGQAPRLLIYGASSRATGIPARFSGSGSGTDFTLTISRLEPEDFAVYYCQTYDDNRSAVVFGQGTKVEIK

SEQ ID NO: 4573 - protein, 248 aa, synthetic construct
QVQLVESGGGVVQPGRSLRLSCAASGFTFSSYAMHWVRQAPGKGLEWVAVISYDGSNKYYADSVKGRFTISRDNSKNTLYLQMNSLRAEDTAVYYCARDGASGDLDYWGQWGQGTLVTVSSGGSSRSSSSGGGGSGGGGEIVLTQSPATLSLSPGERATLSCRASQSVSSSYLAWYQQKPGQAPRLLIYGASSRATGIPARFSGSGSGTDFTLTISRLEPEDFAVYYCQQLNTYPPWTFGQGTKVEIK

SEQ ID NO: 4574 - protein, 248 aa, synthetic construct
QVQLVESGGGVVQPGRSLRLSCAASGFTFSSYAMHWVRQAPGKGLEWVAVISYDGSNKYYADSVKGRFTISRDNSKNTLYLQMNSLRAEDTAVYYCARDGGGDYGFDPWGQWGQGTLVTVSSGGSSRSSSSGGGGSGGGGEIVLTQSPATLSLSPGERATLSCRASQSVSSSYLAWYQQKPGQAPRLLIYGASSRATGIPARFSGSGSGTDFTLTISRLEPEDFAVYYCQQYDRLPLTFGQGTKVEIK

SEQ ID NO: 4575 - protein, 249 aa, synthetic construct
QVQLVESGGGVVQPGRSLRLSCAASGFTFSSYAMHWVRQAPGKGLEWVAVISYDGSNKYYADSVKGRFTISRDNSKNTLYLQMNSLRAEDTAVYYCARDGGTAAFDYWGQWGQGTLVTVSSGGSSRSSSSGGGGSGGGGEIVLTQSPATLSLSPGERATLSCRASQSVSSSYLAWYQQKPGQAPRLLIYGASSRATGIPARFSGSGSGTDFTLTISRLEPEDFAVYYCSSYTSSSPLVVFGQGTKVEIK

SEQ ID NO: 4576 - protein, 253 aa, synthetic construct
QVQLVESGGGVVQPGRSLRLSCAASGFTFSSYAMHWVRQAPGKGLEWVAVISYDGSNKYYADSVKGRFTISRDNSKNTLYLQMNSLRAEDTAVYYCARDGGYRRTNYWFDYWGQWGQGTLVTVSSGGSSRSSSSGGGGSGGGGEIVLTQSPATLSLSPGERATLSCRASQSVSSSYLAWYQQKPGQAPRLLIYGASSRATGIPARFSGSGSGTDFTLTISRLEPEDFAVYYCNSRDSDSHQAVFGQGTKVEIK

SEQ ID NO: 4577 - protein, 247 aa, synthetic construct
QVQLVESGGGVVQPGRSLRLSCAASGFTFSSYAMHWVRQAPGKGLEWVAVISYDGSNKYYADSVKGRFTISRDNSKNTLYLQMNSLRAEDTAVYYCARDGRAPASDYWGQWGQGTLVTVSSGGSSRSSSSGGGGSGGGGEIVLTQSPATLSLSPGERATLSCRASQSVSSSYLAWYQQKPGQAPRLLIYGASSRATGIPARFSGSGSGTDFTLTISRLEPEDFAVYYCSSYTSSSVVFGQGTKVEIK

SEQ ID NO: 4578 - protein, 260 aa, synthetic construct
QVQLVESGGGVVQPGRSLRLSCAASGFTFSSYAMHWVRQAPGKGLEWVAVISYDGSNKYYADSVKGRFTISRDNSKNTLYLQMNSLRAEDTAVYYCARDGYFYRRNVTMYYSSYMDYWGQWGQGTLVTVSSGGSSRSSSSGGGGSGGGGEIVLTQSPATLSLSPGERATLSCRASQSVSSSYLAWYQQKPGQAPRLLIYGASSRATGIPARFSGSGSGTDFTLTISRLEPEDFAVYYCQSYDSSLSGDVVFGQGTKVEIK

SEQ ID NO: 4579 - protein, 257 aa, synthetic construct
QVQLVESGGGVVQPGRSLRLSCAASGFTFSSYAMHWVRQAPGKGLEWVAVISYDGSNKYYADSVKGRFTISRDNSKNTLYLQMNSLRAEDTAVYYCARDGYFYRRNVTTYNSSYMDYWGQWGQGTLVTVSSGGSSRSSSSGGGGSGGGGEIVLTQSPATLSLSPGERATLSCRASQSVSSSYLAWYQQKPGQAPRLLIYGASSRATGIPARFSGSGSGTDFTLTISRLEPEDFAVYYCQQSYSPPPTFGQGTKVEIK

SEQ ID NO: 4580 - protein, 260 aa, synthetic construct
QVQLVESGGGVVQPGRSLRLSCAASGFTFSSYAMHWVRQAPGKGLEWVAVISYDGSNKYYADSVKGRFTISRDNSKNTLYLQMNSLRAEDTAVYYCARDGYFYRRNVTTYYSSYMDYWGQWGQGTLVTVSSGGSSRSSSSGGGGSGGGGEIVLTQSPATLSLSPGERATLSCRASQSVSSSYLAWYQQKPGQAPRLLIYGASSRATGIPARFSGSGSGTDFTLTISRLEPEDFAVYYCAAWDDSSLSGYVFGQGTKVEIK

SEQ ID NO: 4581 - protein, 257 aa, synthetic construct
QVQLVESGGGVVQPGRSLRLSCAASGFTFSSYAMHWVRQAPGKGLEWVAVISYDGSNKYYADSVKGRFTISRDNSKNTLYLQMNSLRAEDTAVYYCARDGYFYRRNVTTYYSSYMDYWGQWGQGTLVTVSSGGSSRSSSSGGGGSGGGGEIVLTQSPATLSLSPGERATLSCRASQSVSSSYLAWYQQKPGQAPRLLIYGASSRATGIPARFSGSGSGTDFTLTISRLEPEDFAVYYCQQANRFPFTFGQGTKVEIK

SEQ ID NO: 4582 - protein, 257 aa, synthetic construct
QVQLVESGGGVVQPGRSLRLSCAASGFTFSSYAMHWVRQAPGKGLEWVAVISYDGSNKYYADSVKGRFTISRDNSKNTLYLQMNSLRAEDTAVYYCARDGYFYRRNVTTYYSSYMDYWGQWGQGTLVTVSSGGSSRSSSSGGGGSGGGGEIVLTQSPATLSLSPGERATLSCRASQSVSSSYLAWYQQKPGQAPRLLIYGASSRATGIPARFSGSGSGTDFTLTISRLEPEDFAVYYCQQSDTPMYTFGQGTKVEIK

SEQ ID NO: 4583 - protein, 258 aa, synthetic construct
QVQLVESGGGVVQPGRSLRLSCAASGFTFSSYAMHWVRQAPGKGLEWVAVISYDGSNKYYADSVKGRFTISRDNSKNTLYLQMNSLRAEDTAVYYCARDGYFYRRNVTTYYSSYMDYWGQWGQGTLVTVSSGGSSRSSSSGGGGSGGGGEIVLTQSPATLSLSPGERATLSCRASQSVSSSYLAWYQQKPGQAPRLLIYGASSRATGIPARFSGSGSGTDFTLTISRLEPEDFAVYYCQQSYSPPAYTFGQGTKVEIK

SEQ ID NO: 4584 - protein, 257 aa, synthetic construct
QVQLVESGGGVVQPGRSLRLSCAASGFTFSSYAMHWVRQAPGKGLEWVAVISYDGSNKYYADSVKGRFTISRDNSKNTLYLQMNSLRAEDTAVYYCARDGYFYRRNVTTYYSSYMDYWGQWGQGTLVTVSSGGSSRSSSSGGGGSGGGGEIVLTQSPATLSLSPGERATLSCRASQSVSSSYLAWYQQKPGQAPRLLIYGASSRATGIPARFSGSGSGTDFTLTISRLEPEDFAVYYCQQSYSPPPTFGQGTKVEIK

SEQ ID NO: 4585 - protein, 257 aa, synthetic construct
QVQLVESGGGVVQPGRSLRLSCAASGFTFSSYAMHWVRQAPGKGLEWVAVISYDGSNKYYADSVKGRFTISRDNSKNTLYLQMNSLRAEDTAVYYCARDGYFYRRNVTTYYSSYMDYWGQWGQGTLVTVSSGGSSRSSSSGGGGSGGGGEIVLTQSPATLSLSPGERATLSCRASQSVSSSYLAWYQQKPGQAPRLLIYGASSRATGIPARFSGSGSGTDFTLTISRLEPEDFAVYYCQQYYSYPQTFGQGTKVEIK

SEQ ID NO: 4586 - protein, 259 aa, synthetic construct
QVQLVESGGGVVQPGRSLRLSCAASGFTFSSYAMHWVRQAPGKGLEWVAVISYDGSNKYYADSVKGRFTISRDNSKNTLYLQMNSLRAEDTAVYYCARDGYFYRRNVTTYYSSYMDYWGQWGQGTLVTVSSGGSSRSSSSGGGGSGGGGEIVLTQSPATLSLSPGERATLSCRASQSVSSSYLAWYQQKPGQAPRLLIYGASSRATGIPARFSGSGSGTDFTLTISRLEPEDFAVYYCQSYDSSLSGWLFGQGTKVEIK

SEQ ID NO: 4587 - protein, 257 aa, synthetic construct
QVQLVESGGGVVQPGRSLRLSCAASGFTFSSYAMHWVRQAPGKGLEWVAVISYDGSNKYYADSVKGRFTISRDNSKNTLYLQMNSLRAEDTAVYYCARDGYFYRRNVTTYYSSYMDYWGQWGQGTLVTVSSGGSSRSSSSGGGGSGGGGEIVLTQSPATLSLSPGERATLSCRASQSVSSSYLAWYQQKPGQAPRLLIYGASSRATGIPARFSGSGSGTDFTLTISRLEPEDFAVYYCQTWDSFGQVFGQGTKVEIK

SEQ ID NO: 4588 - protein, 260 aa, synthetic construct
QVQLVESGGGVVQPGRSLRLSCAASGFTFSSYAMHWVRQAPGKGLEWVAVISYDGSNKYYADSVKGRFTISRDNSKNTLYLQMNSLRAEDTAVYYCARDGYFYRRNVTTYYSSYMDYWGQWGQGTLVTVSSGGSSRSSSSGGGGSGGGGEIVLTQSPATLSLSPGERATLSCRASQSVSSSYLAWYQQKPGQAPRLLIYGASSRATGIPARFSGSGSGTDFTLTISRLEPEDFAVYYCQVWDSNSSPRVVFGQGTKVEIK

SEQ ID NO: 4589 - protein, 260 aa, synthetic construct
QVQLVESGGGVVQPGRSLRLSCAASGFTFSSYAMHWVRQAPGKGLEWVAVISYDGSNKYYADSVKGRFTISRDNSKNTLYLQMNSLRAEDTAVYYCARDGYFYRRNVTTYYSSYMDYWGQWGQGTLVTVSSGGSSRSSSSGGGGSGGGGEIVLTQSPATLSLSPGERATLSCRASQSVSSSYLAWYQQKPGQAPRLLIYGASSRATGIPARFSGSGSGTDFTLTISRLEPEDFAVYYCQVWDSSSDLQGVFGQGTKVEIK

SEQ ID NO: 4590 - protein, 258 aa, synthetic construct
QVQLVESGGGVVQPGRSLRLSCAASGFTFSSYAMHWVRQAPGKGLEWVAVISYDGSNKYYADSVKGRFTISRDNSKNTLYLQMNSLRAEDTAVYYCARDGYFYRRNVTTYYSSYMDYWGQWGQGTLVTVSSGGSSRSSSSGGGGSGGGGEIVLTQSPATLSLSPGERATLSCRASQSVSSSYLAWYQQKPGQAPRLLIYGASSRATGIPARFSGSGSGTDFTLTISRLEPEDFAVYYCSSYTSSSTRGFGQGTKVEIK

SEQ ID NO: 4591 - protein, 247 aa, synthetic construct
QVQLVESGGGVVQPGRSLRLSCAASGFTFSSYAMHWVRQAPGKGLEWVAVISYDGSNKYYADSVKGRFTISRDNSKNTLYLQMNSLRAEDTAVYYCARDIGSGAFDIWGQWGQGTLVTVSSGGSSRSSSSGGGGSGGGGEIVLTQSPATLSLSPGERATLSCRASQSVSSSYLAWYQQKPGQAPRLLIYGASSRATGIPARFSGSGSGTDFTLTISRLEPEDFAVYYCQQSYSPPITFGQGTKVEIK

SEQ ID NO: 4592 - protein, 257 aa, synthetic construct
QVQLVESGGGVVQPGRSLRLSCAASGFTFSSYAMHWVRQAPGKGLEWVAVISYDGSNKYYADSVKGRFTISRDNSKNTLYLQMNSLRAEDTAVYYCARDKEAYRSSNSYWYGMDVWGQWGQGTLVTVSSGGSSRSSSSGGGGSGGGGEIVLTQSPATLSLSPGERATLSCRASQSVSSSYLAWYQQKPGQAPRLLIYGASSRATGIPARFSGSGSGTDFTLTISRLEPEDFAVYYCGTWDSSSGAGVFGQGTKVEIK

SEQ ID NO: 4593 - protein, 247 aa, synthetic construct
QVQLVESGGGVVQPGRSLRLSCAASGFTFSSYAMHWVRQAPGKGLEWVAVISYDGSNKYYADSVKGRFTISRDNSKNTLYLQMNSLRAEDTAVYYCARDKGADTPFDYWGQWGQGTLVTVSSGGSSRSSSSGGGGSGGGGEIVLTQSPATLSLSPGERATLSCRASQSVSSSYLAWYQQKPGQAPRLLIYGASSRATGIPARFSGSGSGTDFTLTISRLEPEDFAVYYCLQYHAFASFGQGTKVEIK

SEQ ID NO: 4594 - protein, 248 aa, synthetic construct
QVQLVESGGGVVQPGRSLRLSCAASGFTFSSYAMHWVRQAPGKGLEWVAVISYDGSNKYYADSVKGRFTISRDNSKNTLYLQMNSLRAEDTAVYYCARDKGGMVPFDYWGQWGQGTLVTVSSGGSSRSSSSGGGGSGGGGEIVLTQSPATLSLSPGERATLSCRASQSVSSSYLAWYQQKPGQAPRLLIYGASSRATGIPARFSGSGSGTDFTLTISRLEPEDFAVYYCQQYDSVPLTFGQGTKVEIK

SEQ ID NO: 4595 - protein, 248 aa, synthetic construct
QVQLVESGGGVVQPGRSLRLSCAASGFTFSSYAMHWVRQAPGKGLEWVAVISYDGSNKYYADSVKGRFTISRDNSKNTLYLQMNSLRAEDTAVYYCARDKGGMYGFDYWGQWGQGTLVTVSSGGSSRSSSSGGGGSGGGGEIVLTQSPATLSLSPGERATLSCRASQSVSSSYLAWYQQKPGQAPRLLIYGASSRATGIPARFSGSGSGTDFTLTISRLEPEDFAVYYCQQYDSLPLTFGQGTKVEIK

SEQ ID NO: 4596 - protein, 259 aa, synthetic construct
QVQLVESGGGVVQPGRSLRLSCAASGFTFSSYAMHWVRQAPGKGLEWVAVISYDGSNKYYADSVKGRFTISRDNSKNTLYLQMNSLRAEDTAVYYCARDKSGYRSGHIGIYGGLGMDVWGQWGQGTLVTVSSGGSSRSSSSGGGGSGGGGEIVLTQSPATLSLSPGERATLSCRASQSVSSSYLAWYQQKPGQAPRLLIYGASSRATGIPARFSGSGSGTDFTLTISRLEPEDFAVYYCQVWDSSSFWVFGQGTKVEIK

SEQ ID NO: 4597 - protein, 256 aa, synthetic construct
QVQLVESGGGVVQPGRSLRLSCAASGFTFSSYAMHWVRQAPGKGLEWVAVISYDGSNKYYADSVKGRFTISRDNSKNTLYLQMNSLRAEDTAVYYCARDLFAYRHVGYGCFDYWGQWGQGTLVTVSSGGSSRSSSSGGGGSGGGGEIVLTQSPATLSLSPGERATLSCRASQSVSSSYLAWYQQKPGQAPRLLIYGASSRATGIPARFSGSGSGTDFTLTISRLEPEDFAVYYCGTWDSRLLSGGMFGQGTKVEIK

SEQ ID NO: 4598 - protein, 257 aa, synthetic construct
QVQLVESGGGVVQPGRSLRLSCAASGFTFSSYAMHWVRQAPGKGLEWVAVISYDGSNKYYADSVKGRFTISRDNSKNTLYLQMNSLRAEDTAVYYCARDLGNYRSKQVYFNAFDIWGQWGQGTLVTVSSGGSSRSSSSGGGGSGGGGEIVLTQSPATLSLSPGERATLSCRASQSVSSSYLAWYQQKPGQAPRLLIYGASSRATGIPARFSGSGSGTDFTLTISRLEPEDFAVYYCQAWDSRSANVAFGQGTKVEIK

SEQ ID NO: 4599 - protein, 251 aa, synthetic construct
QVQLVESGGGVVQPGRSLRLSCAASGFTFSSYAMHWVRQAPGKGLEWVAVISYDGSNKYYADSVKGRFTISRDNSKNTLYLQMNSLRAEDTAVYYCARDLRGAWGPGGFDVWGQWGQGTLVTVSSGGSSRSSSSGGGGSGGGGEIVLTQSPATLSLSPGERATLSCRASQSVSSSYLAWYQQKPGQAPRLLIYGASSRATGIPARFSGSGSGTDFTLTISRLEPEDFAVYYCQQYYYTPLTFGQGTKVEIK

SEQ ID NO: 4600 - protein, 250 aa, synthetic construct
QVQLVESGGGVVQPGRSLRLSCAASGFTFSSYAMHWVRQAPGKGLEWVAVISYDGSNKYYADSVKGRFTISRDNSKNTLYLQMNSLRAEDTAVYYCARDLRGIAVAANWGQWGQGTLVTVSSGGSSRSSSSGGGGSGGGGEIVLTQSPATLSLSPGERATLSCRASQSVSSSYLAWYQQKPGQAPRLLIYGASSRATGIPARFSGSGSGTDFTLTISRLEPEDFAVYYCQSYDISLSALVFGQGTKVEIK

SEQ ID NO: 4601 - protein, 258 aa, synthetic construct
QVQLVESGGGVVQPGRSLRLSCAASGFTFSSYAMHWVRQAPGKGLEWVAVISYDGSNKYYADSVKGRFTISRDNSKNTLYLQMNSLRAEDTAVYYCARDLRGYRGGGTYDAFDVWGQWGQGTLVTVSSGGSSRSSSSGGGGSGGGGEIVLTQSPATLSLSPGERATLSCRASQSVSSSYLAWYQQKPGQAPRLLIYGASSRATGIPARFSGSGSGTDFTLTISRLEPEDFAVYYCGTWDSSLLRASWVFGQGTKVEIK

SEQ ID NO: 4602 - protein, 256 aa, synthetic construct
QVQLVESGGGVVQPGRSLRLSCAASGFTFSSYAMHWVRQAPGKGLEWVAVISYDGSNKYYADSVKGRFTISRDNSKNTLYLQMNSLRAEDTAVYYCARDLRGYRGGGTYDAFDVWGQWGQGTLVTVSSGGSSRSSSSGGGGSGGGGEIVLTQSPATLSLSPGERATLSCRASQSVSSSYLAWYQQKPGQAPRLLIYGASSRATGIPARFSGSGSGTDFTLTISRLEPEDFAVYYCGTWDSSTTAGVFGQGTKVEIK

SEQ ID NO: 4603 - protein, 255 aa, synthetic construct
QVQLVESGGGVVQPGRSLRLSCAASGFTFSSYAMHWVRQAPGKGLEWVAVISYDGSNKYYADSVKGRFTISRDNSKNTLYLQMNSLRAEDTAVYYCARDLTGYRSRSYQWDGMDVWGQWGQGTLVTVSSGGSSRSSSSGGGGSGGGGEIVLTQSPATLSLSPGERATLSCRASQSVSSSYLAWYQQKPGQAPRLLIYGASSRATGIPARFSGSGSGTDFTLTISRLEPEDFAVYYCMQALTPTISFGQGTKVEIK

SEQ ID NO: 4604 - protein, 257 aa, synthetic construct
QVQLVESGGGVVQPGRSLRLSCAASGFTFSSYAMHWVRQAPGKGLEWVAVISYDGSNKYYADSVKGRFTISRDNSKNTLYLQMNSLRAEDTAVYYCARDLTGYRSRSYQWDGMDVWGQWGQGTLVTVSSGGSSRSSSSGGGGSGGGGEIVLTQSPATLSLSPGERATLSCRASQSVSSSYLAWYQQKPGQAPRLLIYGASSRATGIPARFSGSGSGTDFTLTISRLEPEDFAVYYCQSYDSSLSAYVFGQGTKVEIK

SEQ ID NO: 4605 - protein, 257 aa, synthetic construct
QVQLVESGGGVVQPGRSLRLSCAASGFTFSSYAMHWVRQAPGKGLEWVAVISYDGSNKYYADSVKGRFTISRDNSKNTLYLQMNSLRAEDTAVYYCARDLTGYRSRSYQWDGMDVWGQWGQGTLVTVSSGGSSRSSSSGGGGSGGGGEIVLTQSPATLSLSPGERATLSCRASQSVSSSYLAWYQQKPGQAPRLLIYGASSRATGIPARFSGSGSGTDFTLTISRLEPEDFAVYYCQSYDSSLSGYVFGQGTKVEIK

SEQ ID NO: 4606 - protein, 248 aa, synthetic construct
QVQLVESGGGVVQPGRSLRLSCAASGFTFSSYAMHWVRQAPGKGLEWVAVISYDGSNKYYADSVKGRFTISRDNSKNTLYLQMNSLRAEDTAVYYCARDNGAGAFGVWGQWGQGTLVTVSSGGSSRSSSSGGGGSGGGGEIVLTQSPATLSLSPGERATLSCRASQSVSSSYLAWYQQKPGQAPRLLIYGASSRATGIPARFSGSGSGTDFTLTISRLEPEDFAVYYCQQLNSNPPWTFGQGTKVEIK

SEQ ID NO: 4607 - protein, 255 aa, synthetic construct
QVQLVESGGGVVQPGRSLRLSCAASGFTFSSYAMHWVRQAPGKGLEWVAVISYDGSNKYYADSVKGRFTISRDNSKNTLYLQMNSLRAEDTAVYYCARDNLGYRGTHSGYAMDSWGQWGQGTLVTVSSGGSSRSSSSGGGGSGGGGEIVLTQSPATLSLSPGERATLSCRASQSVSSSYLAWYQQKPGQAPRLLIYGASSRATGIPARFSGSGSGTDFTLTISRLEPEDFAVYYCQVWDSSTSVVFGQGTKVEIK

SEQ ID NO: 4608 - protein, 247 aa, synthetic construct
QVQLVESGGGVVQPGRSLRLSCAASGFTFSSYAMHWVRQAPGKGLEWVAVISYDGSNKYYADSVKGRFTISRDNSKNTLYLQMNSLRAEDTAVYYCARDNQYGADDYWGQWGQGTLVTVSSGGSSRSSSSGGGGSGGGGEIVLTQSPATLSLSPGERATLSCRASQSVSSSYLAWYQQKPGQAPRLLIYGASSRATGIPARFSGSGSGTDFTLTISRLEPEDFAVYYCQQTYTLPITFGQGTKVEIK

SEQ ID NO: 4609 - protein, 248 aa, synthetic construct
QVQLVESGGGVVQPGRSLRLSCAASGFTFSSYAMHWVRQAPGKGLEWVAVISYDGSNKYYADSVKGRFTISRDNSKNTLYLQMNSLRAEDTAVYYCARDPALYSGMDYWGQWGQGTLVTVSSGGSSRSSSSGGGGSGGGGEIVLTQSPATLSLSPGERATLSCRASQSVSSSYLAWYQQKPGQAPRLLIYGASSRATGIPARFSGSGSGTDFTLTISRLEPEDFAVYYCETWGRDTRVFGQGTKVEIK

SEQ ID NO: 4610 - protein, 253 aa, synthetic construct
QVQLVESGGGVVQPGRSLRLSCAASGFTFSSYAMHWVRQAPGKGLEWVAVISYDGSNKYYADSVKGRFTISRDNSKNTLYLQMNSLRAEDTAVYYCARDPDSYRSSGTYYFDVWGQWGQGTLVTVSSGGSSRSSSSGGGGSGGGGEIVLTQSPATLSLSPGERATLSCRASQSVSSSYLAWYQQKPGQAPRLLIYGASSRATGIPARFSGSGSGTDFTLTISRLEPEDFAVYYCQQYDSPPWTFGQGTKVEIK

SEQ ID NO: 4611 - protein, 246 aa, synthetic construct
QVQLVESGGGVVQPGRSLRLSCAASGFTFSSYAMHWVRQAPGKGLEWVAVISYDGSNKYYADSVKGRFTISRDNSKNTLYLQMNSLRAEDTAVYYCARDPHGVMDYWGQWGQGTLVTVSSGGSSRSSSSGGGGSGGGGEIVLTQSPATLSLSPGERATLSCRASQSVSSSYLAWYQQKPGQAPRLLIYGASSRATGIPARFSGSGSGTDFTLTISRLEPEDFAVYYCQTWGTGEVVFGQGTKVEIK

SEQ ID NO: 4612 - protein, 247 aa, synthetic construct
QVQLVESGGGVVQPGRSLRLSCAASGFTFSSYAMHWVRQAPGKGLEWVAVISYDGSNKYYADSVKGRFTISRDNSKNTLYLQMNSLRAEDTAVYYCARDPLGYLDVWGQWGQGTLVTVSSGGSSRSSSSGGGGSGGGGEIVLTQSPATLSLSPGERATLSCRASQSVSSSYLAWYQQKPGQAPRLLIYGASSRATGIPARFSGSGSGTDFTLTISRLEPEDFAVYYCQTWGTGIHGVFGQGTKVEIK

SEQ ID NO: 4613 - protein, 253 aa, synthetic construct
QVQLVESGGGVVQPGRSLRLSCAASGFTFSSYAMHWVRQAPGKGLEWVAVISYDGSNKYYADSVKGRFTISRDNSKNTLYLQMNSLRAEDTAVYYCARDPMATRYYYYGMDVWGQWGQGTLVTVSSGGSSRSSSSGGGGSGGGGEIVLTQSPATLSLSPGERATLSCRASQSVSSSYLAWYQQKPGQAPRLLIYGASSRATGIPARFSGSGSGTDFTLTISRLEPEDFAVYYCQAWDSSGLGVFGQGTKVEIK

SEQ ID NO: 4614 - protein, 246 aa, synthetic construct
QVQLVESGGGVVQPGRSLRLSCAASGFTFSSYAMHWVRQAPGKGLEWVAVISYDGSNKYYADSVKGRFTISRDNSKNTLYLQMNSLRAEDTAVYYCARDPSGSLDYWGQWGQGTLVTVSSGGSSRSSSSGGGGSGGGGEIVLTQSPATLSLSPGERATLSCRASQSVSSSYLAWYQQKPGQAPRLLIYGASSRATGIPARFSGSGSGTDFTLTISRLEPEDFAVYYCQTWGTGTVVFGQGTKVEIK

SEQ ID NO: 4615 - protein, 249 aa, synthetic construct
QVQLVESGGGVVQPGRSLRLSCAASGFTFSSYAMHWVRQAPGKGLEWVAVISYDGSNKYYADSVKGRFTISRDNSKNTLYLQMNSLRAEDTAVYYCARDPSGSLDYWGQWGQGTLVTVSSGGSSRSSSSGGGGSGGGGEIVLTQSPATLSLSPGERATLSCRASQSVSSSYLAWYQQKPGQAPRLLIYGASSRATGIPARFSGSGSGTDFTLTISRLEPEDFAVYYCQVWDYSSDLHVVFGQGTKVEIK

SEQ ID NO: 4616 - protein, 249 aa, synthetic construct
QVQLVESGGGVVQPGRSLRLSCAASGFTFSSYAMHWVRQAPGKGLEWVAVISYDGSNKYYADSVKGRFTISRDNSKNTLYLQMNSLRAEDTAVYYCARDPSGSSGLDYWGQWGQGTLVTVSSGGSSRSSSSGGGGSGGGGEIVLTQSPATLSLSPGERATLSCRASQSVSSSYLAWYQQKPGQAPRLLIYGASSRATGIPARFSGSGSGTDFTLTISRLEPEDFAVYYCQAWDSSAHVVFGQGTKVEIK

SEQ ID NO: 4617 - protein, 252 aa, synthetic construct
QVQLVESGGGVVQPGRSLRLSCAASGFTFSSYAMHWVRQAPGKGLEWVAVISYDGSNKYYADSVKGRFTISRDNSKNTLYLQMNSLRAEDTAVYYCARDPSGSSGLDYWGQWGQGTLVTVSSGGSSRSSSSGGGGSGGGGEIVLTQSPATLSLSPGERATLSCRASQSVSSSYLAWYQQKPGQAPRLLIYGASSRATGIPARFSGSGSGTDFTLTISRLEPEDFAVYYCQSYDSSLSGPNWVFGQGTKVEIK

SEQ ID NO: 4618 - protein, 260 aa, synthetic construct
QVQLVESGGGVVQPGRSLRLSCAASGFTFSSYAMHWVRQAPGKGLEWVAVISYDGSNKYYADSVKGRFTISRDNSKNTLYLQMNSLRAEDTAVYYCARDPTGYRLSSLYYYAGFAYGMDLWGQWGQGTLVTVSSGGSSRSSSSGGGGSGGGGEIVLTQSPATLSLSPGERATLSCRASQSVSSSYLAWYQQKPGQAPRLLIYGASSRATGIPARFSGSGSGTDFTLTISRLEPEDFAVYYCQAWDSSTYVFGQGTKVEIK

SEQ ID NO: 4619 - protein, 260 aa, synthetic construct
QVQLVESGGGVVQPGRSLRLSCAASGFTFSSYAMHWVRQAPGKGLEWVAVISYDGSNKYYADSVKGRFTISRDNSKNTLYLQMNSLRAEDTAVYYCARDPTGYRLSSLYYYAGFAYGMDVWGQWGQGTLVTVSSGGSSRSSSSGGGGSGGGGEIVLTQSPATLSLSPGERATLSCRASQSVSSSYLAWYQQKPGQAPRLLIYGASSRATGIPARFSGSGSGTDFTLTISRLEPEDFAVYYCMQETHWPHTFGQGTKVEIK

SEQ ID NO: 4620 - protein, 247 aa, synthetic construct
QVQLVESGGGVVQPGRSLRLSCAASGFTFSSYAMHWVRQAPGKGLEWVAVISYDGSNKYYADSVKGRFTISRDNSKNTLYLQMNSLRAEDTAVYYCARDPTRRFDLWGQWGQGTLVTVSSGGSSRSSSSGGGGSGGGGEIVLTQSPATLSLSPGERATLSCRASQSVSSSYLAWYQQKPGQAPRLLIYGASSRATGIPARFSGSGSGTDFTLTISRLEPEDFAVYYCQAWDSTPGVVFGQGTKVEIK

SEQ ID NO: 4621 - protein, 248 aa, synthetic construct
QVQLVESGGGVVQPGRSLRLSCAASGFTFSSYAMHWVRQAPGKGLEWVAVISYDGSNKYYADSVKGRFTISRDNSKNTLYLQMNSLRAEDTAVYYCARDQRGYGMDVWGQWGQGTLVTVSSGGSSRSSSSGGGGSGGGGEIVLTQSPATLSLSPGERATLSCRASQSVSSSYLAWYQQKPGQAPRLLIYGASSRATGIPARFSGSGSGTDFTLTISRLEPEDFAVYYCQAWDSSPSVVFGQGTKVEIK

SEQ ID NO: 4622 - protein, 255 aa, synthetic construct
QVQLVESGGGVVQPGRSLRLSCAASGFTFSSYAMHWVRQAPGKGLEWVAVISYDGSNKYYADSVKGRFTISRDNSKNTLYLQMNSLRAEDTAVYYCARDQTYYDSSLSYGYAFDIWGQWGQGTLVTVSSGGSSRSSSSGGGGSGGGGEIVLTQSPATLSLSPGERATLSCRASQSVSSSYLAWYQQKPGQAPRLLIYGASSRATGIPARFSGSGSGTDFTLTISRLEPEDFAVYYCETWGSNTRVFGQGTKVEIK

SEQ ID NO: 4623 - protein, 248 aa, synthetic construct
QVQLVESGGGVVQPGRSLRLSCAASGFTFSSYAMHWVRQAPGKGLEWVAVISYDGSNKYYADSVKGRFTISRDNSKNTLYLQMNSLRAEDTAVYYCARDRGGLVFDLWGQWGQGTLVTVSSGGSSRSSSSGGGGSGGGGEIVLTQSPATLSLSPGERATLSCRASQSVSSSYLAWYQQKPGQAPRLLIYGASSRATGIPARFSGSGSGTDFTLTISRLEPEDFAVYYCKAWDSSTSVVFGQGTKVEIK

SEQ ID NO: 4624 - protein, 250 aa, synthetic construct
QVQLVESGGGVVQPGRSLRLSCAASGFTFSSYAMHWVRQAPGKGLEWVAVISYDGSNKYYADSVKGRFTISRDNSKNTLYLQMNSLRAEDTAVYYCARDRGGRDGYGMDVWGQWGQGTLVTVSSGGSSRSSSSGGGGSGGGGEIVLTQSPATLSLSPGERATLSCRASQSVSSSYLAWYQQKPGQAPRLLIYGASSRATGIPARFSGSGSGTDFTLTISRLEPEDFAVYYCQQSDSPPLTFGQGTKVEIK

SEQ ID NO: 4625 - protein, 256 aa, synthetic construct
QVQLVESGGGVVQPGRSLRLSCAASGFTFSSYAMHWVRQAPGKGLEWVAVISYDGSNKYYADSVKGRFTISRDNSKNTLYLQMNSLRAEDTAVYYCARDRGYRGYYAGNWFDPWGQWGQGTLVTVSSGGSSRSSSSGGGGSGGGGEIVLTQSPATLSLSPGERATLSCRASQSVSSSYLAWYQQKPGQAPRLLIYGASSRATGIPARFSGSGSGTDFTLTISRLEPEDFAVYYCGTWDSSLAARWVFGQGTKVEIK

SEQ ID NO: 4626 - protein, 255 aa, synthetic construct
QVQLVESGGGVVQPGRSLRLSCAASGFTFSSYAMHWVRQAPGKGLEWVAVISYDGSNKYYADSVKGRFTISRDNSKNTLYLQMNSLRAEDTAVYYCARDRGYRGYYAGNWFDPWGQWGQGTLVTVSSGGSSRSSSSGGGGSGGGGEIVLTQSPATLSLSPGERATLSCRASQSVSSSYLAWYQQKPGQAPRLLIYGASSRATGIPARFSGSGSGTDFTLTISRLEPEDFAVYYCGTWDSSNSAWVFGQGTKVEIK

SEQ ID NO: 4627 - protein, 253 aa, synthetic construct
QVQLVESGGGVVQPGRSLRLSCAASGFTFSSYAMHWVRQAPGKGLEWVAVISYDGSNKYYADSVKGRFTISRDNSKNTLYLQMNSLRAEDTAVYYCARDRGYRGYYAGNWFDPWGQWGQGTLVTVSSGGSSRSSSSGGGGSGGGGEIVLTQSPATLSLSPGERATLSCRASQSVSSSYLAWYQQKPGQAPRLLIYGASSRATGIPARFSGSGSGTDFTLTISRLEPEDFAVYYCQQSYSPPPTFGQGTKVEIK

SEQ ID NO: 4628 - protein, 255 aa, synthetic construct
QVQLVESGGGVVQPGRSLRLSCAASGFTFSSYAMHWVRQAPGKGLEWVAVISYDGSNKYYADSVKGRFTISRDNSKNTLYLQMNSLRAEDTAVYYCARDRGYRGYYAGNWFDPWGQWGQGTLVTVSSGGSSRSSSSGGGGSGGGGEIVLTQSPATLSLSPGERATLSCRASQSVSSSYLAWYQQKPGQAPRLLIYGASSRATGIPARFSGSGSGTDFTLTISRLEPEDFAVYYCQTFDRSLSGAVFGQGTKVEIK

SEQ ID NO: 4629 - protein, 253 aa, synthetic construct
QVQLVESGGGVVQPGRSLRLSCAASGFTFSSYAMHWVRQAPGKGLEWVAVISYDGSNKYYADSVKGRFTISRDNSKNTLYLQMNSLRAEDTAVYYCARDRGYRGYYAGNWFDPWGQWGQGTLVTVSSGGSSRSSSSGGGGSGGGGEIVLTQSPATLSLSPGERATLSCRASQSVSSSYLAWYQQKPGQAPRLLIYGASSRATGIPARFSGSGSGTDFTLTISRLEPEDFAVYYCQTWDSFGQVFGQGTKVEIK

SEQ ID NO: 4630 - protein, 254 aa, synthetic construct
QVQLVESGGGVVQPGRSLRLSCAASGFTFSSYAMHWVRQAPGKGLEWVAVISYDGSNKYYADSVKGRFTISRDNSKNTLYLQMNSLRAEDTAVYYCARDRGYRSRELFWQFDFWGQWGQGTLVTVSSGGSSRSSSSGGGGSGGGGEIVLTQSPATLSLSPGERATLSCRASQSVSSSYLAWYQQKPGQAPRLLIYGASSRATGIPARFSGSGSGTDFTLTISRLEPEDFAVYYCQAWDSRTSAVFGQGTKVEIK

SEQ ID NO: 4631 - protein, 248 aa, synthetic construct
QVQLVESGGGVVQPGRSLRLSCAASGFTFSSYAMHWVRQAPGKGLEWVAVISYDGSNKYYADSVKGRFTISRDNSKNTLYLQMNSLRAEDTAVYYCARDRIVPAGSDYWGQWGQGTLVTVSSGGSSRSSSSGGGGSGGGGEIVLTQSPATLSLSPGERATLSCRASQSVSSSYLAWYQQKPGQAPRLLIYGASSRATGIPARFSGSGSGTDFTLTISRLEPEDFAVYYCETWDSYTHTFGQGTKVEIK

SEQ ID NO: 4632 - protein, 252 aa, synthetic construct
QVQLVESGGGVVQPGRSLRLSCAASGFTFSSYAMHWVRQAPGKGLEWVAVISYDGSNKYYADSVKGRFTISRDNSKNTLYLQMNSLRAEDTAVYYCARDRIVPAGSDYWGQWGQGTLVTVSSGGSSRSSSSGGGGSGGGGEIVLTQSPATLSLSPGERATLSCRASQSVSSSYLAWYQQKPGQAPRLLIYGASSRATGIPARFSGSGSGTDFTLTISRLEPEDFAVYYCGAWDSSLLSAAGVFGQGTKVEIK

SEQ ID NO: 4633 - protein, 251 aa, synthetic construct
QVQLVESGGGVVQPGRSLRLSCAASGFTFSSYAMHWVRQAPGKGLEWVAVISYDGSNKYYADSVKGRFTISRDNSKNTLYLQMNSLRAEDTAVYYCARDRIVPAGSDYWGQWGQGTLVTVSSGGSSRSSSSGGGGSGGGGEIVLTQSPATLSLSPGERATLSCRASQSVSSSYLAWYQQKPGQAPRLLIYGASSRATGIPARFSGSGSGTDFTLTISRLEPEDFAVYYCGTWDSRLLSGGMFGQGTKVEIK

SEQ ID NO: 4634 - protein, 248 aa, synthetic construct
QVQLVESGGGVVQPGRSLRLSCAASGFTFSSYAMHWVRQAPGKGLEWVAVISYDGSNKYYADSVKGRFTISRDNSKNTLYLQMNSLRAEDTAVYYCARDRIVPAGSDYWGQWGQGTLVTVSSGGSSRSSSSGGGGSGGGGEIVLTQSPATLSLSPGERATLSCRASQSVSSSYLAWYQQKPGQAPRLLIYGASSRATGIPARFSGSGSGTDFTLTISRLEPEDFAVYYCQAWDSRTGVFGQGTKVEIK

SEQ ID NO: 4635 - protein, 250 aa, synthetic construct
QVQLVESGGGVVQPGRSLRLSCAASGFTFSSYAMHWVRQAPGKGLEWVAVISYDGSNKYYADSVKGRFTISRDNSKNTLYLQMNSLRAEDTAVYYCARDRIVPAGSDYWGQWGQGTLVTVSSGGSSRSSSSGGGGSGGGGEIVLTQSPATLSLSPGERATLSCRASQSVSSSYLAWYQQKPGQAPRLLIYGASSRATGIPARFSGSGSGTDFTLTISRLEPEDFAVYYCQAWDSSSTDVVFGQGTKVEIK

SEQ ID NO: 4636 - protein, 248 aa, synthetic construct
QVQLVESGGGVVQPGRSLRLSCAASGFTFSSYAMHWVRQAPGKGLEWVAVISYDGSNKYYADSVKGRFTISRDNSKNTLYLQMNSLRAEDTAVYYCARDRIVPAGSDYWGQWGQGTLVTVSSGGSSRSSSSGGGGSGGGGEIVLTQSPATLSLSPGERATLSCRASQSVSSSYLAWYQQKPGQAPRLLIYGASSRATGIPARFSGSGSGTDFTLTISRLEPEDFAVYYCQQYYSSPYTFGQGTKVEIK

SEQ ID NO: 4637 - protein, 248 aa, synthetic construct
QVQLVESGGGVVQPGRSLRLSCAASGFTFSSYAMHWVRQAPGKGLEWVAVISYDGSNKYYADSVKGRFTISRDNSKNTLYLQMNSLRAEDTAVYYCARDRIVPAGSDYWGQWGQGTLVTVSSGGSSRSSSSGGGGSGGGGEIVLTQSPATLSLSPGERATLSCRASQSVSSSYLAWYQQKPGQAPRLLIYGASSRATGIPARFSGSGSGTDFTLTISRLEPEDFAVYYCQTCDSFGQVFGQGTKVEIK

SEQ ID NO: 4638 - protein, 248 aa, synthetic construct
QVQLVESGGGVVQPGRSLRLSCAASGFTFSSYAMHWVRQAPGKGLEWVAVISYDGSNKYYADSVKGRFTISRDNSKNTLYLQMNSLRAEDTAVYYCARDRIVPAGSDYWGQWGQGTLVTVSSGGSSRSSSSGGGGSGGGGEIVLTQSPATLSLSPGERATLSCRASQSVSSSYLAWYQQKPGQAPRLLIYGASSRATGIPARFSGSGSGTDFTLTISRLEPEDFAVYYCQTWDSFGQVFGQGTKVEIK

SEQ ID NO: 4639 - protein, 250 aa, synthetic construct
QVQLVESGGGVVQPGRSLRLSCAASGFTFSSYAMHWVRQAPGKGLEWVAVISYDGSNKYYADSVKGRFTISRDNSKNTLYLQMNSLRAEDTAVYYCARDRIVPAGSDYWGQWGQGTLVTVSSGGSSRSSSSGGGGSGGGGEIVLTQSPATLSLSPGERATLSCRASQSVSSSYLAWYQQKPGQAPRLLIYGASSRATGIPARFSGSGSGTDFTLTISRLEPEDFAVYYCQVWDSSSDHWVFGQGTKVEIK

SEQ ID NO: 4640 - protein, 249 aa, synthetic construct
QVQLVESGGGVVQPGRSLRLSCAASGFTFSSYAMHWVRQAPGKGLEWVAVISYDGSNKYYADSVKGRFTISRDNSKNTLYLQMNSLRAEDTAVYYCARDRKDFRMDVWGQWGQGTLVTVSSGGSSRSSSSGGGGSGGGGEIVLTQSPATLSLSPGERATLSCRASQSVSSSYLAWYQQKPGQAPRLLIYGASSRATGIPARFSGSGSGTDFTLTISRLEPEDFAVYYCAEWADSLSGGVFGQGTKVEIK

SEQ ID NO: 4641 - protein, 247 aa, synthetic construct
QVQLVESGGGVVQPGRSLRLSCAASGFTFSSYAMHWVRQAPGKGLEWVAVISYDGSNKYYADSVKGRFTISRDNSKNTLYLQMNSLRAEDTAVYYCARDRRDLTLDYWGQWGQGTLVTVSSGGSSRSSSSGGGGSGGGGEIVLTQSPATLSLSPGERATLSCRASQSVSSSYLAWYQQKPGQAPRLLIYGASSRATGIPARFSGSGSGTDFTLTISRLEPEDFAVYYCQAWDSRTVIFGQGTKVEIK

SEQ ID NO: 4642 - protein, 248 aa, synthetic construct
QVQLVESGGGVVQPGRSLRLSCAASGFTFSSYAMHWVRQAPGKGLEWVAVISYDGSNKYYADSVKGRFTISRDNSKNTLYLQMNSLRAEDTAVYYCARDRRDLTLDYWGQWGQGTLVTVSSGGSSRSSSSGGGGSGGGGEIVLTQSPATLSLSPGERATLSCRASQSVSSSYLAWYQQKPGQAPRLLIYGASSRATGIPARFSGSGSGTDFTLTISRLEPEDFAVYYCQAWDSSSTVVFGQGTKVEIK

SEQ ID NO: 4643 - protein, 248 aa, synthetic construct
QVQLVESGGGVVQPGRSLRLSCAASGFTFSSYAMHWVRQAPGKGLEWVAVISYDGSNKYYADSVKGRFTISRDNSKNTLYLQMNSLRAEDTAVYYCARDRRDLTLDYWGQWGQGTLVTVSSGGSSRSSSSGGGGSGGGGEIVLTQSPATLSLSPGERATLSCRASQSVSSSYLAWYQQKPGQAPRLLIYGASSRATGIPARFSGSGSGTDFTLTISRLEPEDFAVYYCQAWDSSTGVVFGQGTKVEIK

SEQ ID NO: 4644 - protein, 249 aa, synthetic construct
QVQLVESGGGVVQPGRSLRLSCAASGFTFSSYAMHWVRQAPGKGLEWVAVISYDGSNKYYADSVKGRFTISRDNSKNTLYLQMNSLRAEDTAVYYCARDRRDLTLDYWGQWGQGTLVTVSSGGSSRSSSSGGGGSGGGGEIVLTQSPATLSLSPGERATLSCRASQSVSSSYLAWYQQKPGQAPRLLIYGASSRATGIPARFSGSGSGTDFTLTISRLEPEDFAVYYCQAWDSSTPDVVFGQGTKVEIK

SEQ ID NO: 4645 - protein, 247 aa, synthetic construct
QVQLVESGGGVVQPGRSLRLSCAASGFTFSSYAMHWVRQAPGKGLEWVAVISYDGSNKYYADSVKGRFTISRDNSKNTLYLQMNSLRAEDTAVYYCARDRRDLTLDYWGQWGQGTLVTVSSGGSSRSSSSGGGGSGGGGEIVLTQSPATLSLSPGERATLSCRASQSVSSSYLAWYQQKPGQAPRLLIYGASSRATGIPARFSGSGSGTDFTLTISRLEPEDFAVYYCQAWDSSTVIFGQGTKVEIK

SEQ ID NO: 4646 - protein, 247 aa, synthetic construct
QVQLVESGGGVVQPGRSLRLSCAASGFTFSSYAMHWVRQAPGKGLEWVAVISYDGSNKYYADSVKGRFTISRDNSKNTLYLQMNSLRAEDTAVYYCARDRRDLTLDYWGQWGQGTLVTVSSGGSSRSSSSGGGGSGGGGEIVLTQSPATLSLSPGERATLSCRASQSVSSSYLAWYQQKPGQAPRLLIYGASSRATGIPARFSGSGSGTDFTLTISRLEPEDFAVYYCQAWDSSTVVFGQGTKVEIK

SEQ ID NO: 4647 - protein, 248 aa, synthetic construct
QVQLVESGGGVVQPGRSLRLSCAASGFTFSSYAMHWVRQAPGKGLEWVAVISYDGSNKYYADSVKGRFTISRDNSKNTLYLQMNSLRAEDTAVYYCARDRRDLTLDYWGQWGQGTLVTVSSGGSSRSSSSGGGGSGGGGEIVLTQSPATLSLSPGERATLSCRASQSVSSSYLAWYQQKPGQAPRLLIYGASSRATGIPARFSGSGSGTDFTLTISRLEPEDFAVYYCQAWDSTAGTVFGQGTKVEIK

SEQ ID NO: 4648 - protein, 248 aa, synthetic construct
QVQLVESGGGVVQPGRSLRLSCAASGFTFSSYAMHWVRQAPGKGLEWVAVISYDGSNKYYADSVKGRFTISRDNSKNTLYLQMNSLRAEDTAVYYCARDRRDLTLDYWGQWGQGTLVTVSSGGSSRSSSSGGGGSGGGGEIVLTQSPATLSLSPGERATLSCRASQSVSSSYLAWYQQKPGQAPRLLIYGASSRATGIPARFSGSGSGTDFTLTISRLEPEDFAVYYCQAWDSTTAVVFGQGTKVEIK

SEQ ID NO: 4649 - protein, 249 aa, synthetic construct
QVQLVESGGGVVQPGRSLRLSCAASGFTFSSYAMHWVRQAPGKGLEWVAVISYDGSNKYYADSVKGRFTISRDNSKNTLYLQMNSLRAEDTAVYYCARDRRDLTLDYWGQWGQGTLVTVSSGGSSRSSSSGGGGSGGGGEIVLTQSPATLSLSPGERATLSCRASQSVSSSYLAWYQQKPGQAPRLLIYGASSRATGIPARFSGSGSGTDFTLTISRLEPEDFAVYYCQVWDSSGDQAVFGQGTKVEIK

SEQ ID NO: 4650 - protein, 249 aa, synthetic construct
QVQLVESGGGVVQPGRSLRLSCAASGFTFSSYAMHWVRQAPGKGLEWVAVISYDGSNKYYADSVKGRFTISRDNSKNTLYLQMNSLRAEDTAVYYCARDRRDLTLDYWGQWGQGTLVTVSSGGSSRSSSSGGGGSGGGGEIVLTQSPATLSLSPGERATLSCRASQSVSSSYLAWYQQKPGQAPRLLIYGASSRATGIPARFSGSGSGTDFTLTISRLEPEDFAVYYCQVWDSSSDQGVFGQGTKVEIK

SEQ ID NO: 4651 - protein, 258 aa, synthetic construct
QVQLVESGGGVVQPGRSLRLSCAASGFTFSSYAMHWVRQAPGKGLEWVAVISYDGSNKYYADSVKGRFTISRDNSKNTLYLQMNSLRAEDTAVYYCARDSGGYRTSGPYFQGYAMDVWGQWGQGTLVTVSSGGSSRSSSSGGGGSGGGGEIVLTQSPATLSLSPGERATLSCRASQSVSSSYLAWYQQKPGQAPRLLIYGASSRATGIPARFSGSGSGTDFTLTISRLEPEDFAVYYCETWDSFNHLVFGQGTKVEIK

SEQ ID NO: 4652 - protein, 257 aa, synthetic construct
QVQLVESGGGVVQPGRSLRLSCAASGFTFSSYAMHWVRQAPGKGLEWVAVISYDGSNKYYADSVKGRFTISRDNSKNTLYLQMNSLRAEDTAVYYCARDSGGYRTSGPYFQGYAMDVWGQWGQGTLVTVSSGGSSRSSSSGGGGSGGGGEIVLTQSPATLSLSPGERATLSCRASQSVSSSYLAWYQQKPGQAPRLLIYGASSRATGIPARFSGSGSGTDFTLTISRLEPEDFAVYYCMQATQFPRTFGQGTKVEIK

SEQ ID NO: 4653 - protein, 257 aa, synthetic construct
QVQLVESGGGVVQPGRSLRLSCAASGFTFSSYAMHWVRQAPGKGLEWVAVISYDGSNKYYADSVKGRFTISRDNSKNTLYLQMNSLRAEDTAVYYCARDSGGYRTSGPYFQGYAMDVWGQWGQGTLVTVSSGGSSRSSSSGGGGSGGGGEIVLTQSPATLSLSPGERATLSCRASQSVSSSYLAWYQQKPGQAPRLLIYGASSRATGIPARFSGSGSGTDFTLTISRLEPEDFAVYYCQHYDSTPITFGQGTKVEIK

SEQ ID NO: 4654 - protein, 259 aa, synthetic construct
QVQLVESGGGVVQPGRSLRLSCAASGFTFSSYAMHWVRQAPGKGLEWVAVISYDGSNKYYADSVKGRFTISRDNSKNTLYLQMNSLRAEDTAVYYCARDSGGYRTSGPYFQGYAMDVWGQWGQGTLVTVSSGGSSRSSSSGGGGSGGGGEIVLTQSPATLSLSPGERATLSCRASQSVSSSYLAWYQQKPGQAPRLLIYGASSRATGIPARFSGSGSGTDFTLTISRLEPEDFAVYYCQQYGSSSPDYTFGQGTKVEIK

SEQ ID NO: 4655 - protein, 258 aa, synthetic construct
QVQLVESGGGVVQPGRSLRLSCAASGFTFSSYAMHWVRQAPGKGLEWVAVISYDGSNKYYADSVKGRFTISRDNSKNTLYLQMNSLRAEDTAVYYCARDSGGYRTSGPYFQGYAMDVWGQWGQGTLVTVSSGGSSRSSSSGGGGSGGGGEIVLTQSPATLSLSPGERATLSCRASQSVSSSYLAWYQQKPGQAPRLLIYGASSRATGIPARFSGSGSGTDFTLTISRLEPEDFAVYYCQSYDSSNHVVFGQGTKVEIK

SEQ ID NO: 4656 - protein, 257 aa, synthetic construct
QVQLVESGGGVVQPGRSLRLSCAASGFTFSSYAMHWVRQAPGKGLEWVAVISYDGSNKYYADSVKGRFTISRDNSKNTLYLQMNSLRAEDTAVYYCARDSGGYRTSGPYFQGYAMDVWGQWGQGTLVTVSSGGSSRSSSSGGGGSGGGGEIVLTQSPATLSLSPGERATLSCRASQSVSSSYLAWYQQKPGQAPRLLIYGASSRATGIPARFSGSGSGTDFTLTISRLEPEDFAVYYCQTWDSFGQVFGQGTKVEIK

SEQ ID NO: 4657 - protein, 259 aa, synthetic construct
QVQLVESGGGVVQPGRSLRLSCAASGFTFSSYAMHWVRQAPGKGLEWVAVISYDGSNKYYADSVKGRFTISRDNSKNTLYLQMNSLRAEDTAVYYCARDSGGYRTSGPYFQGYAMDVWGQWGQGTLVTVSSGGSSRSSSSGGGGSGGGGEIVLTQSPATLSLSPGERATLSCRASQSVSSSYLAWYQQKPGQAPRLLIYGASSRATGIPARFSGSGSGTDFTLTISRLEPEDFAVYYCSAWDSSRSAGVFGQGTKVEIK

SEQ ID NO: 4658 - protein, 249 aa, synthetic construct
QVQLVESGGGVVQPGRSLRLSCAASGFTFSSYAMHWVRQAPGKGLEWVAVISYDGSNKYYADSVKGRFTISRDNSKNTLYLQMNSLRAEDTAVYYCARDSGTFSTDYWGQWGQGTLVTVSSGGSSRSSSSGGGGSGGGGEIVLTQSPATLSLSPGERATLSCRASQSVSSSYLAWYQQKPGQAPRLLIYGASSRATGIPARFSGSGSGTDFTLTISRLEPEDFAVYYCSSYTSSSTLVVFGQGTKVEIK

SEQ ID NO: 4659 - protein, 261 aa, synthetic construct
QVQLVESGGGVVQPGRSLRLSCAASGFTFSSYAMHWVRQAPGKGLEWVAVISYDGSNKYYADSVKGRFTISRDNSKNTLYLQMNSLRAEDTAVYYCARDSLYRGGGYLYYASWWMDLWGQWGQGTLVTVSSGGSSRSSSSGGGGSGGGGEIVLTQSPATLSLSPGERATLSCRASQSVSSSYLAWYQQKPGQAPRLLIYGASSRATGIPARFSGSGSGTDFTLTISRLEPEDFAVYYCGTWDNSLSDGHYVFGQGTKVEIK

SEQ ID NO: 4660 - protein, 248 aa, synthetic construct
QVQLVESGGGVVQPGRSLRLSCAASGFTFSSYAMHWVRQAPGKGLEWVAVISYDGSNKYYADSVKGRFTISRDNSKNTLYLQMNSLRAEDTAVYYCARDSSNWFGIDHWGQWGQGTLVTVSSGGSSRSSSSGGGGSGGGGEIVLTQSPATLSLSPGERATLSCRASQSVSSSYLAWYQQKPGQAPRLLIYGASSRATGIPARFSGSGSGTDFTLTISRLEPEDFAVYYCQSADSSGAIFGQGTKVEIK

SEQ ID NO: 4661 - protein, 250 aa, synthetic construct
QVQLVESGGGVVQPGRSLRLSCAASGFTFSSYAMHWVRQAPGKGLEWVAVISYDGSNKYYADSVKGRFTISRDNSKNTLYLQMNSLRAEDTAVYYCARDTGYRGTSMLIDHWGQWGQGTLVTVSSGGSSRSSSSGGGGSGGGGEIVLTQSPATLSLSPGERATLSCRASQSVSSSYLAWYQQKPGQAPRLLIYGASSRATGIPARFSGSGSGTDFTLTISRLEPEDFAVYYCMQGLQGPTFGQGTKVEIK

SEQ ID NO: 4662 - protein, 252 aa, synthetic construct
QVQLVESGGGVVQPGRSLRLSCAASGFTFSSYAMHWVRQAPGKGLEWVAVISYDGSNKYYADSVKGRFTISRDNSKNTLYLQMNSLRAEDTAVYYCARDTGYRGTSMLIDHWGQWGQGTLVTVSSGGSSRSSSSGGGGSGGGGEIVLTQSPATLSLSPGERATLSCRASQSVSSSYLAWYQQKPGQAPRLLIYGASSRATGIPARFSGSGSGTDFTLTISRLEPEDFAVYYCMQGTHGRPSTFGQGTKVEIK

SEQ ID NO: 4663 - protein, 247 aa, synthetic construct
QVQLVESGGGVVQPGRSLRLSCAASGFTFSSYAMHWVRQAPGKGLEWVAVISYDGSNKYYADSVKGRFTISRDNSKNTLYLQMNSLRAEDTAVYYCARDVFPYWFDSWGQWGQGTLVTVSSGGSSRSSSSGGGGSGGGGEIVLTQSPATLSLSPGERATLSCRASQSVSSSYLAWYQQKPGQAPRLLIYGASSRATGIPARFSGSGSGTDFTLTISRLEPEDFAVYYCQSYAGRHVVFGQGTKVEIK

SEQ ID NO: 4664 - protein, 246 aa, synthetic construct
QVQLVESGGGVVQPGRSLRLSCAASGFTFSSYAMHWVRQAPGKGLEWVAVISYDGSNKYYADSVKGRFTISRDNSKNTLYLQMNSLRAEDTAVYYCARDVGRGRDYWGQWGQGTLVTVSSGGSSRSSSSGGGGSGGGGEIVLTQSPATLSLSPGERATLSCRASQSVSSSYLAWYQQKPGQAPRLLIYGASSRATGIPARFSGSGSGTDFTLTISRLEPEDFAVYYCQQSYSPPITFGQGTKVEIK

SEQ ID NO: 4665 - protein, 256 aa, synthetic construct
QVQLVESGGGVVQPGRSLRLSCAASGFTFSSYAMHWVRQAPGKGLEWVAVISYDGSNKYYADSVKGRFTISRDNSKNTLYLQMNSLRAEDTAVYYCARDVIVVGSWTYAFGYWGQWGQGTLVTVSSGGSSRSSSSGGGGSGGGGEIVLTQSPATLSLSPGERATLSCRASQSVSSSYLAWYQQKPGQAPRLLIYGASSRATGIPARFSGSGSGTDFTLTISRLEPEDFAVYYCGTWDSSLTGLSGVFGQGTKVEIK

SEQ ID NO: 4666 - protein, 259 aa, synthetic construct
QVQLVESGGGVVQPGRSLRLSCAASGFTFSSYAMHWVRQAPGKGLEWVAVISYDGSNKYYADSVKGRFTISRDNSKNTLYLQMNSLRAEDTAVYYCARDVKNYRAYELHSLNFMDVWGQWGQGTLVTVSSGGSSRSSSSGGGGSGGGGEIVLTQSPATLSLSPGERATLSCRASQSVSSSYLAWYQQKPGQAPRLLIYGASSRATGIPARFSGSGSGTDFTLTISRLEPEDFAVYYCQVWDSSSSDRVVFGQGTKVEIK

SEQ ID NO: 4667 - protein, 251 aa, synthetic construct
QVQLVESGGGVVQPGRSLRLSCAASGFTFSSYAMHWVRQAPGKGLEWVAVISYDGSNKYYADSVKGRFTISRDNSKNTLYLQMNSLRAEDTAVYYCARDVSGDGFDFWGQWGQGTLVTVSSGGSSRSSSSGGGGSGGGGEIVLTQSPATLSLSPGERATLSCRASQSVSSSYLAWYQQKPGQAPRLLIYGASSRATGIPARFSGSGSGTDFTLTISRLEPEDFAVYYCQSYDSSLLGPYVVFGQGTKVEIK

SEQ ID NO: 4668 - protein, 253 aa, synthetic construct
QVQLVESGGGVVQPGRSLRLSCAASGFTFSSYAMHWVRQAPGKGLEWVAVISYDGSNKYYADSVKGRFTISRDNSKNTLYLQMNSLRAEDTAVYYCAREAVSPYSNSPRADYWGQWGQGTLVTVSSGGSSRSSSSGGGGSGGGGEIVLTQSPATLSLSPGERATLSCRASQSVSSSYLAWYQQKPGQAPRLLIYGASSRATGIPARFSGSGSGTDFTLTISRLEPEDFAVYYCQAWDSTPGVVFGQGTKVEIK

SEQ ID NO: 4669 - protein, 247 aa, synthetic construct
QVQLVESGGGVVQPGRSLRLSCAASGFTFSSYAMHWVRQAPGKGLEWVAVISYDGSNKYYADSVKGRFTISRDNSKNTLYLQMNSLRAEDTAVYYCAREGGFGASDYWGQWGQGTLVTVSSGGSSRSSSSGGGGSGGGGEIVLTQSPATLSLSPGERATLSCRASQSVSSSYLAWYQQKPGQAPRLLIYGASSRATGIPARFSGSGSGTDFTLTISRLEPEDFAVYYCQQANSPPITFGQGTKVEIK

SEQ ID NO: 4670 - protein, 249 aa, synthetic construct
QVQLVESGGGVVQPGRSLRLSCAASGFTFSSYAMHWVRQAPGKGLEWVAVISYDGSNKYYADSVKGRFTISRDNSKNTLYLQMNSLRAEDTAVYYCAREGGRLGFDPWGQWGQGTLVTVSSGGSSRSSSSGGGGSGGGGEIVLTQSPATLSLSPGERATLSCRASQSVSSSYLAWYQQKPGQAPRLLIYGASSRATGIPARFSGSGSGTDFTLTISRLEPEDFAVYYCGTWDSSAPAVVFGQGTKVEIK

SEQ ID NO: 4671 - protein, 246 aa, synthetic construct
QVQLVESGGGVVQPGRSLRLSCAASGFTFSSYAMHWVRQAPGKGLEWVAVISYDGSNKYYADSVKGRFTISRDNSKNTLYLQMNSLRAEDTAVYYCAREGRRGMDVWGQWGQGTLVTVSSGGSSRSSSSGGGGSGGGGEIVLTQSPATLSLSPGERATLSCRASQSVSSSYLAWYQQKPGQAPRLLIYGASSRATGIPARFSGSGSGTDFTLTISRLEPEDFAVYYCQQEDSPPITFGQGTKVEIK

SEQ ID NO: 4672 - protein, 253 aa, synthetic construct
QVQLVESGGGVVQPGRSLRLSCAASGFTFSSYAMHWVRQAPGKGLEWVAVISYDGSNKYYADSVKGRFTISRDNSKNTLYLQMNSLRAEDTAVYYCAREGSGYESDSSSRVDYWGQWGQGTLVTVSSGGSSRSSSSGGGGSGGGGEIVLTQSPATLSLSPGERATLSCRASQSVSSSYLAWYQQKPGQAPRLLIYGASSRATGIPARFSGSGSGTDFTLTISRLEPEDFAVYYCQQAYSPPVTFGQGTKVEIK

SEQ ID NO: 4673 - protein, 252 aa, synthetic construct
QVQLVESGGGVVQPGRSLRLSCAASGFTFSSYAMHWVRQAPGKGLEWVAVISYDGSNKYYADSVKGRFTISRDNSKNTLYLQMNSLRAEDTAVYYCAREGYRCASCGAFDVWGQWGQGTLVTVSSGGSSRSSSSGGGGSGGGGEIVLTQSPATLSLSPGERATLSCRASQSVSSSYLAWYQQKPGQAPRLLIYGASSRATGIPARFSGSGSGTDFTLTISRLEPEDFAVYYCGTWDSSLSGVFGQGTKVEIK

SEQ ID NO: 4674 - protein, 253 aa, synthetic construct
QVQLVESGGGVVQPGRSLRLSCAASGFTFSSYAMHWVRQAPGKGLEWVAVISYDGSNKYYADSVKGRFTISRDNSKNTLYLQMNSLRAEDTAVYYCARENLWSASGGAPSMDPWGQWGQGTLVTVSSGGSSRSSSSGGGGSGGGGEIVLTQSPATLSLSPGERATLSCRASQSVSSSYLAWYQQKPGQAPRLLIYGASSRATGIPARFSGSGSGTDFTLTISRLEPEDFAVYYCTQSLQPPIVFGQGTKVEIK

SEQ ID NO: 4675 - protein, 254 aa, synthetic construct
QVQLVESGGGVVQPGRSLRLSCAASGFTFSSYAMHWVRQAPGKGLEWVAVISYDGSNKYYADSVKGRFTISRDNSKNTLYLQMNSLRAEDTAVYYCAREPYRVRLFRYMDYWGQWGQGTLVTVSSGGSSRSSSSGGGGSGGGGEIVLTQSPATLSLSPGERATLSCRASQSVSSSYLAWYQQKPGQAPRLLIYGASSRATGIPARFSGSGSGTDFTLTISRLEPEDFAVYYCQSYDSRLSGFYVFGQGTKVEIK

SEQ ID NO: 4676 - protein, 253 aa, synthetic construct
QVQLVESGGGVVQPGRSLRLSCAASGFTFSSYAMHWVRQAPGKGLEWVAVISYDGSNKYYADSVKGRFTISRDNSKNTLYLQMNSLRAEDTAVYYCARERAGYGVWSATRMDYWGQWGQGTLVTVSSGGSSRSSSSGGGGSGGGGEIVLTQSPATLSLSPGERATLSCRASQSVSSSYLAWYQQKPGQAPRLLIYGASSRATGIPARFSGSGSGTDFTLTISRLEPEDFAVYYCQQAYSPPVTFGQGTKVEIK

SEQ ID NO: 4677 - protein, 254 aa, synthetic construct
QVQLVESGGGVVQPGRSLRLSCAASGFTFSSYAMHWVRQAPGKGLEWVAVISYDGSNKYYADSVKGRFTISRDNSKNTLYLQMNSLRAEDTAVYYCARERFQTISYTTGFDIWGQWGQGTLVTVSSGGSSRSSSSGGGGSGGGGEIVLTQSPATLSLSPGERATLSCRASQSVSSSYLAWYQQKPGQAPRLLIYGASSRATGIPARFSGSGSGTDFTLTISRLEPEDFAVYYCASWDDSLNGRVFGQGTKVEIK

SEQ ID NO: 4678 - protein, 255 aa, synthetic construct
QVQLVESGGGVVQPGRSLRLSCAASGFTFSSYAMHWVRQAPGKGLEWVAVISYDGSNKYYADSVKGRFTISRDNSKNTLYLQMNSLRAEDTAVYYCARERFQTISYTTGFDIWGQWGQGTLVTVSSGGSSRSSSSGGGGSGGGGEIVLTQSPATLSLSPGERATLSCRASQSVSSSYLAWYQQKPGQAPRLLIYGASSRATGIPARFSGSGSGTDFTLTISRLEPEDFAVYYCGTWDSSLSAGGVFGQGTKVEIK

SEQ ID NO: 4679 - protein, 252 aa, synthetic construct
QVQLVESGGGVVQPGRSLRLSCAASGFTFSSYAMHWVRQAPGKGLEWVAVISYDGSNKYYADSVKGRFTISRDNSKNTLYLQMNSLRAEDTAVYYCARERFQTISYTTGFDIWGQWGQGTLVTVSSGGSSRSSSSGGGGSGGGGEIVLTQSPATLSLSPGERATLSCRASQSVSSSYLAWYQQKPGQAPRLLIYGASSRATGIPARFSGSGSGTDFTLTISRLEPEDFAVYYCQQAYSPPVTFGQGTKVEIK

SEQ ID NO: 4680 - protein, 252 aa, synthetic construct
QVQLVESGGGVVQPGRSLRLSCAASGFTFSSYAMHWVRQAPGKGLEWVAVISYDGSNKYYADSVKGRFTISRDNSKNTLYLQMNSLRAEDTAVYYCARERFQTISYTTGFDIWGQWGQGTLVTVSSGGSSRSSSSGGGGSGGGGEIVLTQSPATLSLSPGERATLSCRASQSVSSSYLAWYQQKPGQAPRLLIYGASSRATGIPARFSGSGSGTDFTLTISRLEPEDFAVYYCQQEDSPPITFGQGTKVEIK

SEQ ID NO: 4681 - protein, 252 aa, synthetic construct
QVQLVESGGGVVQPGRSLRLSCAASGFTFSSYAMHWVRQAPGKGLEWVAVISYDGSNKYYADSVKGRFTISRDNSKNTLYLQMNSLRAEDTAVYYCARERFQTISYTTGFDIWGQWGQGTLVTVSSGGSSRSSSSGGGGSGGGGEIVLTQSPATLSLSPGERATLSCRASQSVSSSYLAWYQQKPGQAPRLLIYGASSRATGIPARFSGSGSGTDFTLTISRLEPEDFAVYYCQQSDSPPITFGQGTKVEIK

SEQ ID NO: 4682 - protein, 252 aa, synthetic construct
QVQLVESGGGVVQPGRSLRLSCAASGFTFSSYAMHWVRQAPGKGLEWVAVISYDGSNKYYADSVKGRFTISRDNSKNTLYLQMNSLRAEDTAVYYCARERFQTISYTTGFDIWGQWGQGTLVTVSSGGSSRSSSSGGGGSGGGGEIVLTQSPATLSLSPGERATLSCRASQSVSSSYLAWYQQKPGQAPRLLIYGASSRATGIPARFSGSGSGTDFTLTISRLEPEDFAVYYCQQSNSPPITFGQGTKVEIK

SEQ ID NO: 4683 - protein, 252 aa, synthetic construct
QVQLVESGGGVVQPGRSLRLSCAASGFTFSSYAMHWVRQAPGKGLEWVAVISYDGSNKYYADSVKGRFTISRDNSKNTLYLQMNSLRAEDTAVYYCARERFQTISYTTGFDIWGQWGQGTLVTVSSGGSSRSSSSGGGGSGGGGEIVLTQSPATLSLSPGERATLSCRASQSVSSSYLAWYQQKPGQAPRLLIYGASSRATGIPARFSGSGSGTDFTLTISRLEPEDFAVYYCQQSYSPPITFGQGTKVEIK

SEQ ID NO: 4684 - protein, 252 aa, synthetic construct
QVQLVESGGGVVQPGRSLRLSCAASGFTFSSYAMHWVRQAPGKGLEWVAVISYDGSNKYYADSVKGRFTISRDNSKNTLYLQMNSLRAEDTAVYYCARERFQTISYTTGFDIWGQWGQGTLVTVSSGGSSRSSSSGGGGSGGGGEIVLTQSPATLSLSPGERATLSCRASQSVSSSYLAWYQQKPGQAPRLLIYGASSRATGIPARFSGSGSGTDFTLTISRLEPEDFAVYYCQQSYSPPPTFGQGTKVEIK

SEQ ID NO: 4685 - protein, 252 aa, synthetic construct
QVQLVESGGGVVQPGRSLRLSCAASGFTFSSYAMHWVRQAPGKGLEWVAVISYDGSNKYYADSVKGRFTISRDNSKNTLYLQMNSLRAEDTAVYYCARERFQTISYTTGFDIWGQWGQGTLVTVSSGGSSRSSSSGGGGSGGGGEIVLTQSPATLSLSPGERATLSCRASQSVSSSYLAWYQQKPGQAPRLLIYGASSRATGIPARFSGSGSGTDFTLTISRLEPEDFAVYYCQSYDDTGPLFGQGTKVEIK

SEQ ID NO: 4686 - protein, 249 aa, synthetic construct
QVQLVESGGGVVQPGRSLRLSCAASGFTFSSYAMHWVRQAPGKGLEWVAVISYDGSNKYYADSVKGRFTISRDNSKNTLYLQMNSLRAEDTAVYYCARERGSGEYAVDYWGQWGQGTLVTVSSGGSSRSSSSGGGGSGGGGEIVLTQSPATLSLSPGERATLSCRASQSVSSSYLAWYQQKPGQAPRLLIYGASSRATGIPARFSGSGSGTDFTLTISRLEPEDFAVYYCQQSDSPPITFGQGTKVEIK

SEQ ID NO: 4687 - protein, 254 aa, synthetic construct
QVQLVESGGGVVQPGRSLRLSCAASGFTFSSYAMHWVRQAPGKGLEWVAVISYDGSNKYYADSVKGRFTISRDNSKNTLYLQMNSLRAEDTAVYYCAREVGRASRHYFIYGMDVWGQWGQGTLVTVSSGGSSRSSSSGGGGSGGGGEIVLTQSPATLSLSPGERATLSCRASQSVSSSYLAWYQQKPGQAPRLLIYGASSRATGIPARFSGSGSGTDFTLTISRLEPEDFAVYYCQQYYSPPITFGQGTKVEIK

SEQ ID NO: 4688 - protein, 254 aa, synthetic construct
QVQLVESGGGVVQPGRSLRLSCAASGFTFSSYAMHWVRQAPGKGLEWVAVISYDGSNKYYADSVKGRFTISRDNSKNTLYLQMNSLRAEDTAVYYCAREWRGFPYYYYASWMDPWGQWGQGTLVTVSSGGSSRSSSSGGGGSGGGGEIVLTQSPATLSLSPGERATLSCRASQSVSSSYLAWYQQKPGQAPRLLIYGASSRATGIPARFSGSGSGTDFTLTISRLEPEDFAVYYCQAWDSSTYVFGQGTKVEIK

SEQ ID NO: 4689 - protein, 252 aa, synthetic construct
QVQLVESGGGVVQPGRSLRLSCAASGFTFSSYAMHWVRQAPGKGLEWVAVISYDGSNKYYADSVKGRFTISRDNSKNTLYLQMNSLRAEDTAVYYCARFGQDTLRYAYGMDPWGQWGQGTLVTVSSGGSSRSSSSGGGGSGGGGEIVLTQSPATLSLSPGERATLSCRASQSVSSSYLAWYQQKPGQAPRLLIYGASSRATGIPARFSGSGSGTDFTLTISRLEPEDFAVYYCQQYDNLPITFGQGTKVEIK

SEQ ID NO: 4690 - protein, 252 aa, synthetic construct
QVQLVESGGGVVQPGRSLRLSCAASGFTFSSYAMHWVRQAPGKGLEWVAVISYDGSNKYYADSVKGRFTISRDNSKNTLYLQMNSLRAEDTAVYYCARFGQDTLRYAYGMDPWGQWGQGTLVTVSSGGSSRSSSSGGGGSGGGGEIVLTQSPATLSLSPGERATLSCRASQSVSSSYLAWYQQKPGQAPRLLIYGASSRATGIPARFSGSGSGTDFTLTISRLEPEDFAVYYCQQYDSLPITFGQGTKVEIK

SEQ ID NO: 4691 - protein, 251 aa, synthetic construct
QVQLVESGGGVVQPGRSLRLSCAASGFTFSSYAMHWVRQAPGKGLEWVAVISYDGSNKYYADSVKGRFTISRDNSKNTLYLQMNSLRAEDTAVYYCARFSGRYNGDFDYWGQWGQGTLVTVSSGGSSRSSSSGGGGSGGGGEIVLTQSPATLSLSPGERATLSCRASQSVSSSYLAWYQQKPGQAPRLLIYGASSRATGIPARFSGSGSGTDFTLTISRLEPEDFAVYYCQVWDSGSLHPVFGQGTKVEIK

SEQ ID NO: 4692 - protein, 251 aa, synthetic construct
QVQLVESGGGVVQPGRSLRLSCAASGFTFSSYAMHWVRQAPGKGLEWVAVISYDGSNKYYADSVKGRFTISRDNSKNTLYLQMNSLRAEDTAVYYCARFYGRVGYYYGMDVWGQWGQGTLVTVSSGGSSRSSSSGGGGSGGGGEIVLTQSPATLSLSPGERATLSCRASQSVSSSYLAWYQQKPGQAPRLLIYGASSRATGIPARFSGSGSGTDFTLTISRLEPEDFAVYYCQQYDLPPISFGQGTKVEIK

SEQ ID NO: 4693 - protein, 246 aa, synthetic construct
QVQLVESGGGVVQPGRSLRLSCAASGFTFSSYAMHWVRQAPGKGLEWVAVISYDGSNKYYADSVKGRFTISRDNSKNTLYLQMNSLRAEDTAVYYCARGADLTYWGQWGQGTLVTVSSGGSSRSSSSGGGGSGGGGEIVLTQSPATLSLSPGERATLSCRASQSVSSSYLAWYQQKPGQAPRLLIYGASSRATGIPARFSGSGSGTDFTLTISRLEPEDFAVYYCQQYGSSSPGYSFGQGTKVEIK

SEQ ID NO: 4694 - protein, 253 aa, synthetic construct
QVQLVESGGGVVQPGRSLRLSCAASGFTFSSYAMHWVRQAPGKGLEWVAVISYDGSNKYYADSVKGRFTISRDNSKNTLYLQMNSLRAEDTAVYYCARGASSSYWEPDNYWGQWGQGTLVTVSSGGSSRSSSSGGGGSGGGGEIVLTQSPATLSLSPGERATLSCRASQSVSSSYLAWYQQKPGQAPRLLIYGASSRATGIPARFSGSGSGTDFTLTISRLEPEDFAVYYCAAWDSSLNLLYVFGQGTKVEIK

SEQ ID NO: 4695 - protein, 250 aa, synthetic construct
QVQLVESGGGVVQPGRSLRLSCAASGFTFSSYAMHWVRQAPGKGLEWVAVISYDGSNKYYADSVKGRFTISRDNSKNTLYLQMNSLRAEDTAVYYCARGAYRRVPKMFDIWGQWGQGTLVTVSSGGSSRSSSSGGGGSGGGGEIVLTQSPATLSLSPGERATLSCRASQSVSSSYLAWYQQKPGQAPRLLIYGASSRATGIPARFSGSGSGTDFTLTISRLEPEDFAVYYCQQYYSAPYTFGQGTKVEIK

SEQ ID NO: 4696 - protein, 250 aa, synthetic construct
QVQLVESGGGVVQPGRSLRLSCAASGFTFSSYAMHWVRQAPGKGLEWVAVISYDGSNKYYADSVKGRFTISRDNSKNTLYLQMNSLRAEDTAVYYCARGAYRRVPKMFDIWGQWGQGTLVTVSSGGSSRSSSSGGGGSGGGGEIVLTQSPATLSLSPGERATLSCRASQSVSSSYLAWYQQKPGQAPRLLIYGASSRATGIPARFSGSGSGTDFTLTISRLEPEDFAVYYCQQYYSPPHTFGQGTKVEIK

SEQ ID NO: 4697 - protein, 247 aa, synthetic construct
QVQLVESGGGVVQPGRSLRLSCAASGFTFSSYAMHWVRQAPGKGLEWVAVISYDGSNKYYADSVKGRFTISRDNSKNTLYLQMNSLRAEDTAVYYCARGDYNAFDRWGQWGQGTLVTVSSGGSSRSSSSGGGGSGGGGEIVLTQSPATLSLSPGERATLSCRASQSVSSSYLAWYQQKPGQAPRLLIYGASSRATGIPARFSGSGSGTDFTLTISRLEPEDFAVYYCETWDSFNHLVFGQGTKVEIK

SEQ ID NO: 4698 - protein, 255 aa, synthetic construct
QVQLVESGGGVVQPGRSLRLSCAASGFTFSSYAMHWVRQAPGKGLEWVAVISYDGSNKYYADSVKGRFTISRDNSKNTLYLQMNSLRAEDTAVYYCARGDYRVTGSTTYFDHWGQWGQGTLVTVSSGGSSRSSSSGGGGSGGGGEIVLTQSPATLSLSPGERATLSCRASQSVSSSYLAWYQQKPGQAPRLLIYGASSRATGIPARFSGSGSGTDFTLTISRLEPEDFAVYYCQSYDSSLSGGGVFGQGTKVEIK

SEQ ID NO: 4699 - protein, 245 aa, synthetic construct
QVQLVESGGGVVQPGRSLRLSCAASGFTFSSYAMHWVRQAPGKGLEWVAVISYDGSNKYYADSVKGRFTISRDNSKNTLYLQMNSLRAEDTAVYYCARGGSPSDHWGQWGQGTLVTVSSGGSSRSSSSGGGGSGGGGEIVLTQSPATLSLSPGERATLSCRASQSVSSSYLAWYQQKPGQAPRLLIYGASSRATGIPARFSGSGSGTDFTLTISRLEPEDFAVYYCQQYYDGRRTFGQGTKVEIK

SEQ ID NO: 4700 - protein, 252 aa, synthetic construct
QVQLVESGGGVVQPGRSLRLSCAASGFTFSSYAMHWVRQAPGKGLEWVAVISYDGSNKYYADSVKGRFTISRDNSKNTLYLQMNSLRAEDTAVYYCARGGYSSSYYWYGMDLWGQWGQGTLVTVSSGGSSRSSSSGGGGSGGGGEIVLTQSPATLSLSPGERATLSCRASQSVSSSYLAWYQQKPGQAPRLLIYGASSRATGIPARFSGSGSGTDFTLTISRLEPEDFAVYYCQQALQAPITFGQGTKVEIK

SEQ ID NO: 4701 - protein, 247 aa, synthetic construct
QVQLVESGGGVVQPGRSLRLSCAASGFTFSSYAMHWVRQAPGKGLEWVAVISYDGSNKYYADSVKGRFTISRDNSKNTLYLQMNSLRAEDTAVYYCARGKAWGWFDPWGQWGQGTLVTVSSGGSSRSSSSGGGGSGGGGEIVLTQSPATLSLSPGERATLSCRASQSVSSSYLAWYQQKPGQAPRLLIYGASSRATGIPARFSGSGSGTDFTLTISRLEPEDFAVYYCQQFDSIPWTFGQGTKVEIK

SEQ ID NO: 4702 - protein, 247 aa, synthetic construct
QVQLVESGGGVVQPGRSLRLSCAASGFTFSSYAMHWVRQAPGKGLEWVAVISYDGSNKYYADSVKGRFTISRDNSKNTLYLQMNSLRAEDTAVYYCARGKAWGWFDPWGQWGQGTLVTVSSGGSSRSSSSGGGGSGGGGEIVLTQSPATLSLSPGERATLSCRASQSVSSSYLAWYQQKPGQAPRLLIYGASSRATGIPARFSGSGSGTDFTLTISRLEPEDFAVYYCQQYYSFPWTFGQGTKVEIK

SEQ ID NO: 4703 - protein, 253 aa, synthetic construct
QVQLVESGGGVVQPGRSLRLSCAASGFTFSSYAMHWVRQAPGKGLEWVAVISYDGSNKYYADSVKGRFTISRDNSKNTLYLQMNSLRAEDTAVYYCARGKRASGDAFGPWGQWGQGTLVTVSSGGSSRSSSSGGGGSGGGGEIVLTQSPATLSLSPGERATLSCRASQSVSSSYLAWYQQKPGQAPRLLIYGASSRATGIPARFSGSGSGTDFTLTISRLEPEDFAVYYCGTWDSSLSGLSYVFGQGTKVEIK

SEQ ID NO: 4704 - protein, 258 aa, synthetic construct
QVQLVESGGGVVQPGRSLRLSCAASGFTFSSYAMHWVRQAPGKGLEWVAVISYDGSNKYYADSVKGRFTISRDNSKNTLYLQMNSLRAEDTAVYYCARGLRGYRGGGTYDAFDVWGQWGQGTLVTVSSGGSSRSSSSGGGGSGGGGEIVLTQSPATLSLSPGERATLSCRASQSVSSSYLAWYQQKPGQAPRLLIYGASSRATGIPARFSGSGSGTDFTLTISRLEPEDFAVYYCGTWDSSLSDQGWVFGQGTKVEIK

SEQ ID NO: 4705 - protein, 257 aa, synthetic construct
QVQLVESGGGVVQPGRSLRLSCAASGFTFSSYAMHWVRQAPGKGLEWVAVISYDGSNKYYADSVKGRFTISRDNSKNTLYLQMNSLRAEDTAVYYCARGLRGYRGGGTYDAFDVWGQWGQGTLVTVSSGGSSRSSSSGGGGSGGGGEIVLTQSPATLSLSPGERATLSCRASQSVSSSYLAWYQQKPGQAPRLLIYGASSRATGIPARFSGSGSGTDFTLTISRLEPEDFAVYYCGTWDSSSSPRWVFGQGTKVEIK

SEQ ID NO: 4706 - protein, 254 aa, synthetic construct
QVQLVESGGGVVQPGRSLRLSCAASGFTFSSYAMHWVRQAPGKGLEWVAVISYDGSNKYYADSVKGRFTISRDNSKNTLYLQMNSLRAEDTAVYYCARGLRGYRGGGTYDAFDVWGQWGQGTLVTVSSGGSSRSSSSGGGGSGGGGEIVLTQSPATLSLSPGERATLSCRASQSVSSSYLAWYQQKPGQAPRLLIYGASSRATGIPARFSGSGSGTDFTLTISRLEPEDFAVYYCQQTSDFPYTFGQGTKVEIK

SEQ ID NO: 4707 - protein, 254 aa, synthetic construct
QVQLVESGGGVVQPGRSLRLSCAASGFTFSSYAMHWVRQAPGKGLEWVAVISYDGSNKYYADSVKGRFTISRDNSKNTLYLQMNSLRAEDTAVYYCARGLRGYRGGGTYDAFDVWGQWGQGTLVTVSSGGSSRSSSSGGGGSGGGGEIVLTQSPATLSLSPGERATLSCRASQSVSSSYLAWYQQKPGQAPRLLIYGASSRATGIPARFSGSGSGTDFTLTISRLEPEDFAVYYCQQYNSYSWTFGQGTKVEIK

SEQ ID NO: 4708 - protein, 251 aa, synthetic construct
QVQLVESGGGVVQPGRSLRLSCAASGFTFSSYAMHWVRQAPGKGLEWVAVISYDGSNKYYADSVKGRFTISRDNSKNTLYLQMNSLRAEDTAVYYCARGLYRGFGVGFDIWGQWGQGTLVTVSSGGSSRSSSSGGGGSGGGGEIVLTQSPATLSLSPGERATLSCRASQSVSSSYLAWYQQKPGQAPRLLIYGASSRATGIPARFSGSGSGTDFTLTISRLEPEDFAVYYCQQYNSYSPVTFGQGTKVEIK

SEQ ID NO: 4709 - protein, 253 aa, synthetic construct
QVQLVESGGGVVQPGRSLRLSCAASGFTFSSYAMHWVRQAPGKGLEWVAVISYDGSNKYYADSVKGRFTISRDNSKNTLYLQMNSLRAEDTAVYYCARGPGGMSGWIGYWGQWGQGTLVTVSSGGSSRSSSSGGGGSGGGGEIVLTQSPATLSLSPGERATLSCRASQSVSSSYLAWYQQKPGQAPRLLIYGASSRATGIPARFSGSGSGTDFTLTISRLEPEDFAVYYCGTWDSSLSSLDYVFGQGTKVEIK

SEQ ID NO: 4710 - protein, 252 aa, synthetic construct
QVQLVESGGGVVQPGRSLRLSCAASGFTFSSYAMHWVRQAPGKGLEWVAVISYDGSNKYYADSVKGRFTISRDNSKNTLYLQMNSLRAEDTAVYYCARGPYRRSYFSYGMDVWGQWGQGTLVTVSSGGSSRSSSSGGGGSGGGGEIVLTQSPATLSLSPGERATLSCRASQSVSSSYLAWYQQKPGQAPRLLIYGASSRATGIPARFSGSGSGTDFTLTISRLEPEDFAVYYCGTWGSTGIVFGQGTKVEIK

SEQ ID NO: 4711 - protein, 252 aa, synthetic construct
QVQLVESGGGVVQPGRSLRLSCAASGFTFSSYAMHWVRQAPGKGLEWVAVISYDGSNKYYADSVKGRFTISRDNSKNTLYLQMNSLRAEDTAVYYCARGPYRRSYFSYGMDVWGQWGQGTLVTVSSGGSSRSSSSGGGGSGGGGEIVLTQSPATLSLSPGERATLSCRASQSVSSSYLAWYQQKPGQAPRLLIYGASSRATGIPARFSGSGSGTDFTLTISRLEPEDFAVYYCQQEDNLPPTFGQGTKVEIK

SEQ ID NO: 4712 - protein, 247 aa, synthetic construct
QVQLVESGGGVVQPGRSLRLSCAASGFTFSSYAMHWVRQAPGKGLEWVAVISYDGSNKYYADSVKGRFTISRDNSKNTLYLQMNSLRAEDTAVYYCARGQGPYLPYWGQWGQGTLVTVSSGGSSRSSSSGGGGSGGGGEIVLTQSPATLSLSPGERATLSCRASQSVSSSYLAWYQQKPGQAPRLLIYGASSRATGIPARFSGSGSGTDFTLTISRLEPEDFAVYYCQAWDSTPKVVFGQGTKVEIK

SEQ ID NO: 4713 - protein, 255 aa, synthetic construct
QVQLVESGGGVVQPGRSLRLSCAASGFTFSSYAMHWVRQAPGKGLEWVAVISYDGSNKYYADSVKGRFTISRDNSKNTLYLQMNSLRAEDTAVYYCARGRAYRSAPAAYWMDIWGQWGQGTLVTVSSGGSSRSSSSGGGGSGGGGEIVLTQSPATLSLSPGERATLSCRASQSVSSSYLAWYQQKPGQAPRLLIYGASSRATGIPARFSGSGSGTDFTLTISRLEPEDFAVYYCGTWDSSLNVVVFGQGTKVEIK

SEQ ID NO: 4714 - protein, 254 aa, synthetic construct
QVQLVESGGGVVQPGRSLRLSCAASGFTFSSYAMHWVRQAPGKGLEWVAVISYDGSNKYYADSVKGRFTISRDNSKNTLYLQMNSLRAEDTAVYYCARGRGIYYSGGSRSLWGQWGQGTLVTVSSGGSSRSSSSGGGGSGGGGEIVLTQSPATLSLSPGERATLSCRASQSVSSSYLAWYQQKPGQAPRLLIYGASSRATGIPARFSGSGSGTDFTLTISRLEPEDFAVYYCGTWDSSLGAAWIFGQGTKVEIK

SEQ ID NO: 4715 - protein, 249 aa, synthetic construct
QVQLVESGGGVVQPGRSLRLSCAASGFTFSSYAMHWVRQAPGKGLEWVAVISYDGSNKYYADSVKGRFTISRDNSKNTLYLQMNSLRAEDTAVYYCARGRGVIVDYWGQWGQGTLVTVSSGGSSRSSSSGGGGSGGGGEIVLTQSPATLSLSPGERATLSCRASQSVSSSYLAWYQQKPGQAPRLLIYGASSRATGIPARFSGSGSGTDFTLTISRLEPEDFAVYYCNSWDSRGGHLVVFGQGTKVEIK

SEQ ID NO: 4716 - protein, 247 aa, synthetic construct
QVQLVESGGGVVQPGRSLRLSCAASGFTFSSYAMHWVRQAPGKGLEWVAVISYDGSNKYYADSVKGRFTISRDNSKNTLYLQMNSLRAEDTAVYYCARGRGVIVDYWGQWGQGTLVTVSSGGSSRSSSSGGGGSGGGGEIVLTQSPATLSLSPGERATLSCRASQSVSSSYLAWYQQKPGQAPRLLIYGASSRATGIPARFSGSGSGTDFTLTISRLEPEDFAVYYCQAWDSSPSVVFGQGTKVEIK

SEQ ID NO: 4717 - protein, 253 aa, synthetic construct
QVQLVESGGGVVQPGRSLRLSCAASGFTFSSYAMHWVRQAPGKGLEWVAVISYDGSNKYYADSVKGRFTISRDNSKNTLYLQMNSLRAEDTAVYYCARGRGVSYYGLDMWGQWGQGTLVTVSSGGSSRSSSSGGGGSGGGGEIVLTQSPATLSLSPGERATLSCRASQSVSSSYLAWYQQKPGQAPRLLIYGASSRATGIPARFSGSGSGTDFTLTISRLEPEDFAVYYCGTWDSSLSSLDYVFGQGTKVEIK

SEQ ID NO: 4718 - protein, 249 aa, synthetic construct
QVQLVESGGGVVQPGRSLRLSCAASGFTFSSYAMHWVRQAPGKGLEWVAVISYDGSNKYYADSVKGRFTISRDNSKNTLYLQMNSLRAEDTAVYYCARGRSRMDVWGQWGQGTLVTVSSGGSSRSSSSGGGGSGGGGEIVLTQSPATLSLSPGERATLSCRASQSVSSSYLAWYQQKPGQAPRLLIYGASSRATGIPARFSGSGSGTDFTLTISRLEPEDFAVYYCQSSDNATDITQPVFGQGTKVEIK

SEQ ID NO: 4719 - protein, 253 aa, synthetic construct
QVQLVESGGGVVQPGRSLRLSCAASGFTFSSYAMHWVRQAPGKGLEWVAVISYDGSNKYYADSVKGRFTISRDNSKNTLYLQMNSLRAEDTAVYYCARGRYDILTRYGYYFDYWGQWGQGTLVTVSSGGSSRSSSSGGGGSGGGGEIVLTQSPATLSLSPGERATLSCRASQSVSSSYLAWYQQKPGQAPRLLIYGASSRATGIPARFSGSGSGTDFTLTISRLEPEDFAVYYCQQYYSPIFMFGQGTKVEIK

SEQ ID NO: 4720 - protein, 256 aa, synthetic construct; identical to SEQ ID NO: 4249

SEQ ID NO: 4721 - protein, 256 aa, synthetic construct
QVQLVESGGGVVQPGRSLRLSCAASGFTFSSYAMHWVRQAPGKGLEWVAVISYDGSNKYYADSVKGRFTISRDNSKNTLYLQMNSLRAEDTAVYYCARGRYSGRTGYSYWLHYWGQWGQGTLVTVSSGGSSRSSSSGGGGSGGGGEIVLTQSPATLSLSPGERATLSCRASQSVSSSYLAWYQQKPGQAPRLLIYGASSRATGIPARFSGSGSGTDFTLTISRLEPEDFAVYYCAAWDDSLNGPVVFGQGTKVEIK

SEQ ID NO: 4722 - protein, 254 aa, synthetic construct
QVQLVESGGGVVQPGRSLRLSCAASGFTFSSYAMHWVRQAPGKGLEWVAVISYDGSNKYYADSVKGRFTISRDNSKNTLYLQMNSLRAEDTAVYYCARGRYYDSSPPYGYAFDIWGQWGQGTLVTVSSGGSSRSSSSGGGGSGGGGEIVLTQSPATLSLSPGERATLSCRASQSVSSSYLAWYQQKPGQAPRLLIYGASSRATGIPARFSGSGSGTDFTLTISRLEPEDFAVYYCQQSYSPPITFGQGTKVEIK

SEQ ID NO: 4723 - protein, 252 aa, synthetic construct
QVQLVESGGGVVQPGRSLRLSCAASGFTFSSYAMHWVRQAPGKGLEWVAVISYDGSNKYYADSVKGRFTISRDNSKNTLYLQMNSLRAEDTAVYYCARGSAAHGYHFDYWGQWGQGTLVTVSSGGSSRSSSSGGGGSGGGGEIVLTQSPATLSLSPGERATLSCRASQSVSSSYLAWYQQKPGQAPRLLIYGASSRATGIPARFSGSGSGTDFTLTISRLEPEDFAVYYCGTWDSSSSLAVVFGQGTKVEIK

SEQ ID NO: 4724 - protein, 253 aa, synthetic construct
QVQLVESGGGVVQPGRSLRLSCAASGFTFSSYAMHWVRQAPGKGLEWVAVISYDGSNKYYADSVKGRFTISRDNSKNTLYLQMNSLRAEDTAVYYCARGSGKRGSGVDHWGQWGQGTLVTVSSGGSSRSSSSGGGGSGGGGEIVLTQSPATLSLSPGERATLSCRASQSVSSSYLAWYQQKPGQAPRLLIYGASSRATGIPARFSGSGSGTDFTLTISRLEPEDFAVYYCGTWDSSLSGLSYVFGQGTKVEIK

SEQ ID NO: 4725 - protein, 250 aa, synthetic construct
QVQLVESGGGVVQPGRSLRLSCAASGFTFSSYAMHWVRQAPGKGLEWVAVISYDGSNKYYADSVKGRFTISRDNSKNTLYLQMNSLRAEDTAVYYCARGSYASILDVWGQWGQGTLVTVSSGGSSRSSSSGGGGSGGGGEIVLTQSPATLSLSPGERATLSCRASQSVSSSYLAWYQQKPGQAPRLLIYGASSRATGIPARFSGSGSGTDFTLTISRLEPEDFAVYYCQQRSNWPSPGFTFGQGTKVEIK

SEQ ID NO: 4726 - protein, 254 aa, synthetic construct
QVQLVESGGGVVQPGRSLRLSCAASGFTFSSYAMHWVRQAPGKGLEWVAVISYDGSNKYYADSVKGRFTISRDNSKNTLYLQMNSLRAEDTAVYYCARGSYRTSSSKQYLDPWGQWGQGTLVTVSSGGSSRSSSSGGGGSGGGGEIVLTQSPATLSLSPGERATLSCRASQSVSSSYLAWYQQKPGQAPRLLIYGASSRATGIPARFSGSGSGTDFTLTISRLEPEDFAVYYCAAWDDRLNGYVFGQGTKVEIK

SEQ ID NO: 4727 - protein, 254 aa, synthetic construct
QVQLVESGGGVVQPGRSLRLSCAASGFTFSSYAMHWVRQAPGKGLEWVAVISYDGSNKYYADSVKGRFTISRDNSKNTLYLQMNSLRAEDTAVYYCARGSYRTSSSKQYLDPWGQWGQGTLVTVSSGGSSRSSSSGGGGSGGGGEIVLTQSPATLSLSPGERATLSCRASQSVSSSYLAWYQQKPGQAPRLLIYGASSRATGIPARFSGSGSGTDFTLTISRLEPEDFAVYYCSSYDSSSGSLVFGQGTKVEIK

SEQ ID NO: 4728 - protein, 252 aa, synthetic construct
QVQLVESGGGVVQPGRSLRLSCAASGFTFSSYAMHWVRQAPGKGLEWVAVISYDGSNKYYADSVKGRFTISRDNSKNTLYLQMNSLRAEDTAVYYCARGSYRTSSSKQYLDPWGQWGQGTLVTVSSGGSSRSSSSGGGGSGGGGEIVLTQSPATLSLSPGERATLSCRASQSVSSSYLAWYQQKPGQAPRLLIYGASSRATGIPARFSGSGSGTDFTLTISRLEPEDFAVYYCSSYTSSSPVFGQGTKVEIK

SEQ ID NO: 4729 - protein, 253 aa, synthetic construct
QVQLVESGGGVVQPGRSLRLSCAASGFTFSSYAMHWVRQAPGKGLEWVAVISYDGSNKYYADSVKGRFTISRDNSKNTLYLQMNSLRAEDTAVYYCARGTNSYRRLVYDAFDIWGQWGQGTLVTVSSGGSSRSSSSGGGGSGGGGEIVLTQSPATLSLSPGERATLSCRASQSVSSSYLAWYQQKPGQAPRLLIYGASSRATGIPARFSGSGSGTDFTLTISRLEPEDFAVYYCQAWDSSDAVFGQGTKVEIK

SEQ ID NO: 4730 - protein, 255 aa, synthetic construct
QVQLVESGGGVVQPGRSLRLSCAASGFTFSSYAMHWVRQAPGKGLEWVAVISYDGSNKYYADSVKGRFTISRDNSKNTLYLQMNSLRAEDTAVYYCARGTNSYRRLVYDAFDIWGQWGQGTLVTVSSGGSSRSSSSGGGGSGGGGEIVLTQSPATLSLSPGERATLSCRASQSVSSSYLAWYQQKPGQAPRLLIYGASSRATGIPARFSGSGSGTDFTLTISRLEPEDFAVYYCQAWDSSSTYVVFGQGTKVEIK

SEQ ID NO: 4731 - protein, 254 aa, synthetic construct
QVQLVESGGGVVQPGRSLRLSCAASGFTFSSYAMHWVRQAPGKGLEWVAVISYDGSNKYYADSVKGRFTISRDNSKNTLYLQMNSLRAEDTAVYYCARGTNSYRRLVYDAFDIWGQWGQGTLVTVSSGGSSRSSSSGGGGSGGGGEIVLTQSPATLSLSPGERATLSCRASQSVSSSYLAWYQQKPGQAPRLLIYGASSRATGIPARFSGSGSGTDFTLTISRLEPEDFAVYYCQAWDSTPRAVFGQGTKVEIK

SEQ ID NO: 4732 - protein, 253 aa, synthetic construct
QVQLVESGGGVVQPGRSLRLSCAASGFTFSSYAMHWVRQAPGKGLEWVAVISYDGSNKYYADSVKGRFTISRDNSKNTLYLQMNSLRAEDTAVYYCARGTNSYRRLVYDAFDIWGQWGQGTLVTVSSGGSSRSSSSGGGGSGGGGEIVLTQSPATLSLSPGERATLSCRASQSVSSSYLAWYQQKPGQAPRLLIYGASSRATGIPARFSGSGSGTDFTLTISRLEPEDFAVYYCQQRSNWPLTFGQGTKVEIK

SEQ ID NO: 4733 - protein, 255 aa, synthetic construct
QVQLVESGGGVVQPGRSLRLSCAASGFTFSSYAMHWVRQAPGKGLEWVAVISYDGSNKYYADSVKGRFTISRDNSKNTLYLQMNSLRAEDTAVYYCARGTNSYRRLVYDAFDIWGQWGQGTLVTVSSGGSSRSSSSGGGGSGGGGEIVLTQSPATLSLSPGERATLSCRASQSVSSSYLAWYQQKPGQAPRLLIYGASSRATGIPARFSGSGSGTDFTLTISRLEPEDFAVYYCQQRSNWWPPFTFGQGTKVEIK

SEQ ID NO: 4734 - protein, 253 aa, synthetic construct
QVQLVESGGGVVQPGRSLRLSCAASGFTFSSYAMHWVRQAPGKGLEWVAVISYDGSNKYYADSVKGRFTISRDNSKNTLYLQMNSLRAEDTAVYYCARGTNSYRRLVYDAFDIWGQWGQGTLVTVSSGGSSRSSSSGGGGSGGGGEIVLTQSPATLSLSPGERATLSCRASQSVSSSYLAWYQQKPGQAPRLLIYGASSRATGIPARFSGSGSGTDFTLTISRLEPEDFAVYYCQQSYSPPPTFGQGTKVEIK

SEQ ID NO: 4735 - protein, 252 aa, synthetic construct
QVQLVESGGGVVQPGRSLRLSCAASGFTFSSYAMHWVRQAPGKGLEWVAVISYDGSNKYYADSVKGRFTISRDNSKNTLYLQMNSLRAEDTAVYYCARGTNSYRRLVYDAFDIWGQWGQGTLVTVSSGGSSRSSSSGGGGSGGGGEIVLTQSPATLSLSPGERATLSCRASQSVSSSYLAWYQQKPGQAPRLLIYGASSRATGIPARFSGSGSGTDFTLTISRLEPEDFAVYYCQQYNNWPTFGQGTKVEIK

SEQ ID NO: 4736 - protein, 255 aa, synthetic construct
QVQLVESGGGVVQPGRSLRLSCAASGFTFSSYAMHWVRQAPGKGLEWVAVISYDGSNKYYADSVKGRFTISRDNSKNTLYLQMNSLRAEDTAVYYCARGTNSYRRLVYDAFDIWGQWGQGTLVTVSSGGSSRSSSSGGGGSGGGGEIVLTQSPATLSLSPGERATLSCRASQSVSSSYLAWYQQKPGQAPRLLIYGASSRATGIPARFSGSGSGTDFTLTISRLEPEDFAVYYCQSYDSSLSGSVFGQGTKVEIK

SEQ ID NO: 4737 - protein, 256 aa, synthetic construct
QVQLVESGGGVVQPGRSLRLSCAASGFTFSSYAMHWVRQAPGKGLEWVAVISYDGSNKYYADSVKGRFTISRDNSKNTLYLQMNSLRAEDTAVYYCARGTNSYRRLVYDAFDIWGQWGQGTLVTVSSGGSSRSSSSGGGGSGGGGEIVLTQSPATLSLSPGERATLSCRASQSVSSSYLAWYQQKPGQAPRLLIYGASSRATGIPARFSGSGSGTDFTLTISRLEPEDFAVYYCQSYDSSSLGAVVFGQGTKVEIK

SEQ ID NO: 4738 - protein, 253 aa, synthetic construct
QVQLVESGGGVVQPGRSLRLSCAASGFTFSSYAMHWVRQAPGKGLEWVAVISYDGSNKYYADSVKGRFTISRDNSKNTLYLQMNSLRAEDTAVYYCARGTNSYRRLVYDAFDIWGQWGQGTLVTVSSGGSSRSSSSGGGGSGGGGEIVLTQSPATLSLSPGERATLSCRASQSVSSSYLAWYQQKPGQAPRLLIYGASSRATGIPARFSGSGSGTDFTLTISRLEPEDFAVYYCQTWDSFGQVFGQGTKVEIK

SEQ ID NO: 4739 - protein, 255 aa, synthetic construct
QVQLVESGGGVVQPGRSLRLSCAASGFTFSSYAMHWVRQAPGKGLEWVAVISYDGSNKYYADSVKGRFTISRDNSKNTLYLQMNSLRAEDTAVYYCARGTNSYRRLVYDAFDIWGQWGQGTLVTVSSGGSSRSSSSGGGGSGGGGEIVLTQSPATLSLSPGERATLSCRASQSVSSSYLAWYQQKPGQAPRLLIYGASSRATGIPARFSGSGSGTDFTLTISRLEPEDFAVYYCQVWDSSSAHVVFGQGTKVEIK

SEQ ID NO: 4740 - protein, 256 aa, synthetic construct
QVQLVESGGGVVQPGRSLRLSCAASGFTFSSYAMHWVRQAPGKGLEWVAVISYDGSNKYYADSVKGRFTISRDNSKNTLYLQMNSLRAEDTAVYYCARGTNSYRRLVYDAFDIWGQWGQGTLVTVSSGGSSRSSSSGGGGSGGGGEIVLTQSPATLSLSPGERATLSCRASQSVSSSYLAWYQQKPGQAPRLLIYGASSRATGIPARFSGSGSGTDFTLTISRLEPEDFAVYYCQVWDSSSDHSVVFGQGTKVEIK

SEQ ID NO: 4741 - protein, 253 aa, synthetic construct
QVQLVESGGGVVQPGRSLRLSCAASGFTFSSYAMHWVRQAPGKGLEWVAVISYDGSNKYYADSVKGRFTISRDNSKNTLYLQMNSLRAEDTAVYYCARGYSYRSMYRDYFDVWGQWGQGTLVTVSSGGSSRSSSSGGGGSGGGGEIVLTQSPATLSLSPGERATLSCRASQSVSSSYLAWYQQKPGQAPRLLIYGASSRATGIPARFSGSGSGTDFTLTISRLEPEDFAVYYCQQYYSNTPYTFGQGTKVEIK

SEQ ID NO: 4742 - protein, 253 aa, synthetic construct
QVQLVESGGGVVQPGRSLRLSCAASGFTFSSYAMHWVRQAPGKGLEWVAVISYDGSNKYYADSVKGRFTISRDNSKNTLYLQMNSLRAEDTAVYYCARGYYRTANYLYGMDVWGQWGQGTLVTVSSGGSSRSSSSGGGGSGGGGEIVLTQSPATLSLSPGERATLSCRASQSVSSSYLAWYQQKPGQAPRLLIYGASSRATGIPARFSGSGSGTDFTLTISRLEPEDFAVYYCSSYTSSSHLAFGQGTKVEIK

SEQ ID NO: 4743 - protein, 250 aa, synthetic construct
QVQLVESGGGVVQPGRSLRLSCAASGFTFSSYAMHWVRQAPGKGLEWVAVISYDGSNKYYADSVKGRFTISRDNSKNTLYLQMNSLRAEDTAVYYCARHADFEQQLAFDYWGQWGQGTLVTVSSGGSSRSSSSGGGGSGGGGEIVLTQSPATLSLSPGERATLSCRASQSVSSSYLAWYQQKPGQAPRLLIYGASSRATGIPARFSGSGSGTDFTLTISRLEPEDFAVYYCMQSRQLPLTFGQGTKVEIK

SEQ ID NO: 4744 - protein, 249 aa, synthetic construct
QVQLVESGGGVVQPGRSLRLSCAASGFTFSSYAMHWVRQAPGKGLEWVAVISYDGSNKYYADSVKGRFTISRDNSKNTLYLQMNSLRAEDTAVYYCARHAGLISIAALDEWGQWGQGTLVTVSSGGSSRSSSSGGGGSGGGGEIVLTQSPATLSLSPGERATLSCRASQSVSSSYLAWYQQKPGQAPRLLIYGASSRATGIPARFSGSGSGTDFTLTISRLEPEDFAVYYCQSWFPHVVFGQGTKVEIK

SEQ ID NO: 4745 - protein, 250 aa, synthetic construct
QVQLVESGGGVVQPGRSLRLSCAASGFTFSSYAMHWVRQAPGKGLEWVAVISYDGSNKYYADSVKGRFTISRDNSKNTLYLQMNSLRAEDTAVYYCARHAGLISIAALDEWGQWGQGTLVTVSSGGSSRSSSSGGGGSGGGGEIVLTQSPATLSLSPGERATLSCRASQSVSSSYLAWYQQKPGQAPRLLIYGASSRATGIPARFSGSGSGTDFTLTISRLEPEDFAVYYCQTWDSGSVVFGQGTKVEIK

SEQ ID NO: 4746 - protein, 261 aa, synthetic construct
QVQLVESGGGVVQPGRSLRLSCAASGFTFSSYAMHWVRQAPGKGLEWVAVISYDGSNKYYADSVKGRFTISRDNSKNTLYLQMNSLRAEDTAVYYCARHAGLRGYSYGYNSTPPRPNWFDPWGQWGQGTLVTVSSGGSSRSSSSGGGGSGGGGEIVLTQSPATLSLSPGERATLSCRASQSVSSSYLAWYQQKPGQAPRLLIYGASSRATGIPARFSGSGSGTDFTLTISRLEPEDFAVYYCQTWGTGEVVFGQGTKVEIK

SEQ ID NO: 4747 - protein, 248 aa, synthetic construct
QVQLVESGGGVVQPGRSLRLSCAASGFTFSSYAMHWVRQAPGKGLEWVAVISYDGSNKYYADSVKGRFTISRDNSKNTLYLQMNSLRAEDTAVYYCARHGARRHLLDYWGQWGQGTLVTVSSGGSSRSSSSGGGGSGGGGEIVLTQSPATLSLSPGERATLSCRASQSVSSSYLAWYQQKPGQAPRLLIYGASSRATGIPARFSGSGSGTDFTLTISRLEPEDFAVYYCQTWDSFGQVFGQGTKVEIK

SEQ ID NO: 4748 - protein, 256 aa, synthetic construct
QVQLVESGGGVVQPGRSLRLSCAASGFTFSSYAMHWVRQAPGKGLEWVAVISYDGSNKYYADSVKGRFTISRDNSKNTLYLQMNSLRAEDTAVYYCARHGGGTSSGPDGYDYAMDVWGQWGQGTLVTVSSGGSSRSSSSGGGGSGGGGEIVLTQSPATLSLSPGERATLSCRASQSVSSSYLAWYQQKPGQAPRLLIYGASSRATGIPARFSGSGSGTDFTLTISRLEPEDFAVYYCQQHNSYPLTFGQGTKVEIK

SEQ ID NO: 4749 - protein, 247 aa, synthetic construct
QVQLVESGGGVVQPGRSLRLSCAASGFTFSSYAMHWVRQAPGKGLEWVAVISYDGSNKYYADSVKGRFTISRDNSKNTLYLQMNSLRAEDTAVYYCARHGGLLDAFDIWGQWGQGTLVTVSSGGSSRSSSSGGGGSGGGGEIVLTQSPATLSLSPGERATLSCRASQSVSSSYLAWYQQKPGQAPRLLIYGASSRATGIPARFSGSGSGTDFTLTISRLEPEDFAVYYCQQYDYLVSFGQGTKVEIK

SEQ ID NO: 4750 - protein, 249 aa, synthetic construct
QVQLVESGGGVVQPGRSLRLSCAASGFTFSSYAMHWVRQAPGKGLEWVAVISYDGSNKYYADSVKGRFTISRDNSKNTLYLQMNSLRAEDTAVYYCARHGKIGPNAFDIWGQWGQGTLVTVSSGGSSRSSSSGGGGSGGGGEIVLTQSPATLSLSPGERATLSCRASQSVSSSYLAWYQQKPGQAPRLLIYGASSRATGIPARFSGSGSGTDFTLTISRLEPEDFAVYYCQQYDSYPPTFGQGTKVEIK

SEQ ID NO: 4751 - protein, 252 aa, synthetic construct
QVQLVESGGGVVQPGRSLRLSCAASGFTFSSYAMHWVRQAPGKGLEWVAVISYDGSNKYYADSVKGRFTISRDNSKNTLYLQMNSLRAEDTAVYYCARHGLNWNVMDFAFDIWGQWGQGTLVTVSSGGSSRSSSSGGGGSGGGGEIVLTQSPATLSLSPGERATLSCRASQSVSSSYLAWYQQKPGQAPRLLIYGASSRATGIPARFSGSGSGTDFTLTISRLEPEDFAVYYCQQYDSPPVTFGQGTKVEIK

SEQ ID NO: 4752 - protein, 252 aa, synthetic construct
QVQLVESGGGVVQPGRSLRLSCAASGFTFSSYAMHWVRQAPGKGLEWVAVISYDGSNKYYADSVKGRFTISRDNSKNTLYLQMNSLRAEDTAVYYCARHGRELIPQFDHWGQWGQGTLVTVSSGGSSRSSSSGGGGSGGGGEIVLTQSPATLSLSPGERATLSCRASQSVSSSYLAWYQQKPGQAPRLLIYGASSRATGIPARFSGSGSGTDFTLTISRLEPEDFAVYYCAAWDDSLNIGWVFGQGTKVEIK

SEQ ID NO: 4753 - protein, 253 aa, synthetic construct
QVQLVESGGGVVQPGRSLRLSCAASGFTFSSYAMHWVRQAPGKGLEWVAVISYDGSNKYYADSVKGRFTISRDNSKNTLYLQMNSLRAEDTAVYYCARHGRELIPQFDYWGQWGQGTLVTVSSGGSSRSSSSGGGGSGGGGEIVLTQSPATLSLSPGERATLSCRASQSVSSSYLAWYQQKPGQAPRLLIYGASSRATGIPARFSGSGSGTDFTLTISRLEPEDFAVYYCAAWDDGRSGPNWVFGQGTKVEIK

SEQ ID NO: 4754 - protein, 249 aa, synthetic construct
QVQLVESGGGVVQPGRSLRLSCAASGFTFSSYAMHWVRQAPGKGLEWVAVISYDGSNKYYADSVKGRFTISRDNSKNTLYLQMNSLRAEDTAVYYCARHGSLAGRAFDYWGQWGQGTLVTVSSGGSSRSSSSGGGGSGGGGEIVLTQSPATLSLSPGERATLSCRASQSVSSSYLAWYQQKPGQAPRLLIYGASSRATGIPARFSGSGSGTDFTLTISRLEPEDFAVYYCQQYDNPPVTFGQGTKVEIK

SEQ ID NO: 4755 - protein, 248 aa, synthetic construct
QVQLVESGGGVVQPGRSLRLSCAASGFTFSSYAMHWVRQAPGKGLEWVAVISYDGSNKYYADSVKGRFTISRDNSKNTLYLQMNSLRAEDTAVYYCARHGVLDFAMDVWGQWGQGTLVTVSSGGSSRSSSSGGGGSGGGGEIVLTQSPATLSLSPGERATLSCRASQSVSSSYLAWYQQKPGQAPRLLIYGASSRATGIPARFSGSGSGTDFTLTISRLEPEDFAVYYCQQHSSPPITFGQGTKVEIK

SEQ ID NO: 4756 - protein, 250 aa, synthetic construct
QVQLVESGGGVVQPGRSLRLSCAASGFTFSSYAMHWVRQAPGKGLEWVAVISYDGSNKYYADSVKGRFTISRDNSKNTLYLQMNSLRAEDTAVYYCARHHPSAAGAFDIWGQWGQGTLVTVSSGGSSRSSSSGGGGSGGGGEIVLTQSPATLSLSPGERATLSCRASQSVSSSYLAWYQQKPGQAPRLLIYGASSRATGIPARFSGSGSGTDFTLTISRLEPEDFAVYYCQQSYSTPPWTFGQGTKVEIK

SEQ ID NO: 4757 - protein, 246 aa, synthetic construct
QVQLVESGGGVVQPGRSLRLSCAASGFTFSSYAMHWVRQAPGKGLEWVAVISYDGSNKYYADSVKGRFTISRDNSKNTLYLQMNSLRAEDTAVYYCARHIRGGMNVWGQWGQGTLVTVSSGGSSRSSSSGGGGSGGGGEIVLTQSPATLSLSPGERATLSCRASQSVSSSYLAWYQQKPGQAPRLLIYGASSRATGIPARFSGSGSGTDFTLTISRLEPEDFAVYYCQQYYSPPITFGQGTKVEIK

SEQ ID NO: 4758 - protein, 258 aa, synthetic construct
QVQLVESGGGVVQPGRSLRLSCAASGFTFSSYAMHWVRQAPGKGLEWVAVISYDGSNKYYADSVKGRFTISRDNSKNTLYLQMNSLRAEDTAVYYCARHPRHITASKPYTGGGSQYWGQWGQGTLVTVSSGGSSRSSSSGGGGSGGGGEIVLTQSPATLSLSPGERATLSCRASQSVSSSYLAWYQQKPGQAPRLLIYGASSRATGIPARFSGSGSGTDFTLTISRLEPEDFAVYYCQVWDSSTNHWVFGQGTKVEIK

SEQ ID NO: 4759 - protein, 248 aa, synthetic construct
QVQLVESGGGVVQPGRSLRLSCAASGFTFSSYAMHWVRQAPGKGLEWVAVISYDGSNKYYADSVKGRFTISRDNSKNTLYLQMNSLRAEDTAVYYCARHRAGYHIDGWGQWGQGTLVTVSSGGSSRSSSSGGGGSGGGGEIVLTQSPATLSLSPGERATLSCRASQSVSSSYLAWYQQKPGQAPRLLIYGASSRATGIPARFSGSGSGTDFTLTISRLEPEDFAVYYCQAWDSSPLVVFGQGTKVEIK

SEQ ID NO: 4760 - protein, 253 aa, synthetic construct
QVQLVESGGGVVQPGRSLRLSCAASGFTFSSYAMHWVRQAPGKGLEWVAVISYDGSNKYYADSVKGRFTISRDNSKNTLYLQMNSLRAEDTAVYYCARHRFSGSQYAFFDPWGQWGQGTLVTVSSGGSSRSSSSGGGGSGGGGEIVLTQSPATLSLSPGERATLSCRASQSVSSSYLAWYQQKPGQAPRLLIYGASSRATGIPARFSGSGSGTDFTLTISRLEPEDFAVYYCSSYTSSSTLVVFGQGTKVEIK

SEQ ID NO: 4761 - protein, 251 aa, synthetic construct
QVQLVESGGGVVQPGRSLRLSCAASGFTFSSYAMHWVRQAPGKGLEWVAVISYDGSNKYYADSVKGRFTISRDNSKNTLYLQMNSLRAEDTAVYYCARHRGSTLYENYMDVWGQWGQGTLVTVSSGGSSRSSSSGGGGSGGGGEIVLTQSPATLSLSPGERATLSCRASQSVSSSYLAWYQQKPGQAPRLLIYGASSRATGIPARFSGSGSGTDFTLTISRLEPEDFAVYYCQQHEYWPLTFGQGTKVEIK

SEQ ID NO: 4762 - protein, 253 aa, synthetic construct
QVQLVESGGGVVQPGRSLRLSCAASGFTFSSYAMHWVRQAPGKGLEWVAVISYDGSNKYYADSVKGRFTISRDNSKNTLYLQMNSLRAEDTAVYYCARHRGVAGYYAYFDPWGQWGQGTLVTVSSGGSSRSSSSGGGGSGGGGEIVLTQSPATLSLSPGERATLSCRASQSVSSSYLAWYQQKPGQAPRLLIYGASSRATGIPARFSGSGSGTDFTLTISRLEPEDFAVYYCSSYTSSSTLVVFGQGTKVEIK

SEQ ID NO: 4763 - protein, 257 aa, synthetic construct
QVQLVESGGGVVQPGRSLRLSCAASGFTFSSYAMHWVRQAPGKGLEWVAVISYDGSNKYYADSVKGRFTISRDNSKNTLYLQMNSLRAEDTAVYYCARHRRFRGSDYYSYNYPMDVWGQWGQGTLVTVSSGGSSRSSSSGGGGSGGGGEIVLTQSPATLSLSPGERATLSCRASQSVSSSYLAWYQQKPGQAPRLLIYGASSRATGIPARFSGSGSGTDFTLTISRLEPEDFAVYYCQVWDSSALVVFGQGTKVEIK

SEQ ID NO: 4764 - protein, 250 aa, synthetic construct
QVQLVESGGGVVQPGRSLRLSCAASGFTFSSYAMHWVRQAPGKGLEWVAVISYDGSNKYYADSVKGRFTISRDNSKNTLYLQMNSLRAEDTAVYYCARHRSQGYFDLWGQWGQGTLVTVSSGGSSRSSSSGGGGSGGGGEIVLTQSPATLSLSPGERATLSCRASQSVSSSYLAWYQQKPGQAPRLLIYGASSRATGIPARFSGSGSGTDFTLTISRLEPEDFAVYYCGTWDSSLRSLVVFGQGTKVEIK

SEQ ID NO: 4765 - protein, 248 aa, synthetic construct
QVQLVESGGGVVQPGRSLRLSCAASGFTFSSYAMHWVRQAPGKGLEWVAVISYDGSNKYYADSVKGRFTISRDNSKNTLYLQMNSLRAEDTAVYYCARHRSQGYFDLWGQWGQGTLVTVSSGGSSRSSSSGGGGSGGGGEIVLTQSPATLSLSPGERATLSCRASQSVSSSYLAWYQQKPGQAPRLLIYGASSRATGIPARFSGSGSGTDFTLTISRLEPEDFAVYYCQAWDSSTFVVFGQGTKVEIK

SEQ ID NO: 4766 - protein, 250 aa, synthetic construct
QVQLVESGGGVVQPGRSLRLSCAASGFTFSSYAMHWVRQAPGKGLEWVAVISYDGSNKYYADSVKGRFTISRDNSKNTLYLQMNSLRAEDTAVYYCARHRTSAGKIDYWGQWGQGTLVTVSSGGSSRSSSSGGGGSGGGGEIVLTQSPATLSLSPGERATLSCRASQSVSSSYLAWYQQKPGQAPRLLIYGASSRATGIPARFSGSGSGTDFTLTISRLEPEDFAVYYCGTWDSSAPAVVFGQGTKVEIK

SEQ ID NO: 4767 - protein, 251 aa, synthetic construct
QVQLVESGGGVVQPGRSLRLSCAASGFTFSSYAMHWVRQAPGKGLEWVAVISYDGSNKYYADSVKGRFTISRDNSKNTLYLQMNSLRAEDTAVYYCARHRTSAGKIDYWGQWGQGTLVTVSSGGSSRSSSSGGGGSGGGGEIVLTQSPATLSLSPGERATLSCRASQSVSSSYLAWYQQKPGQAPRLLIYGASSRATGIPARFSGSGSGTDFTLTISRLEPEDFAVYYCGTWDSSLLPGYVFGQGTKVEIK

SEQ ID NO: 4768 - protein, 251 aa, synthetic construct
QVQLVESGGGVVQPGRSLRLSCAASGFTFSSYAMHWVRQAPGKGLEWVAVISYDGSNKYYADSVKGRFTISRDNSKNTLYLQMNSLRAEDTAVYYCARHRTSAGKIDYWGQWGQGTLVTVSSGGSSRSSSSGGGGSGGGGEIVLTQSPATLSLSPGERATLSCRASQSVSSSYLAWYQQKPGQAPRLLIYGASSRATGIPARFSGSGSGTDFTLTISRLEPEDFAVYYCGTWDSSLRVSYVFGQGTKVEIK

SEQ ID NO: 4769 - protein, 249 aa, synthetic construct
QVQLVESGGGVVQPGRSLRLSCAASGFTFSSYAMHWVRQAPGKGLEWVAVISYDGSNKYYADSVKGRFTISRDNSKNTLYLQMNSLRAEDTAVYYCARHRTSAGKIDYWGQWGQGTLVTVSSGGSSRSSSSGGGGSGGGGEIVLTQSPATLSLSPGERATLSCRASQSVSSSYLAWYQQKPGQAPRLLIYGASSRATGIPARFSGSGSGTDFTLTISRLEPEDFAVYYCQAWDSSTFVVFGQGTKVEIK

SEQ ID NO: 4770 - protein, 249 aa, synthetic construct
QVQLVESGGGVVQPGRSLRLSCAASGFTFSSYAMHWVRQAPGKGLEWVAVISYDGSNKYYADSVKGRFTISRDNSKNTLYLQMNSLRAEDTAVYYCARHRTSAGKIDYWGQWGQGTLVTVSSGGSSRSSSSGGGGSGGGGEIVLTQSPATLSLSPGERATLSCRASQSVSSSYLAWYQQKPGQAPRLLIYGASSRATGIPARFSGSGSGTDFTLTISRLEPEDFAVYYCQAWDSSTYVVFGQGTKVEIK

SEQ ID NO: 4771 - protein, 249 aa, synthetic construct
QVQLVESGGGVVQPGRSLRLSCAASGFTFSSYAMHWVRQAPGKGLEWVAVISYDGSNKYYADSVKGRFTISRDNSKNTLYLQMNSLRAEDTAVYYCARHRTSAGKIDYWGQWGQGTLVTVSSGGSSRSSSSGGGGSGGGGEIVLTQSPATLSLSPGERATLSCRASQSVSSSYLAWYQQKPGQAPRLLIYGASSRATGIPARFSGSGSGTDFTLTISRLEPEDFAVYYCQAWDSTSLVVFGQGTKVEIK

SEQ ID NO: 4772 - protein, 249 aa, synthetic construct
QVQLVESGGGVVQPGRSLRLSCAASGFTFSSYAMHWVRQAPGKGLEWVAVISYDGSNKYYADSVKGRFTISRDNSKNTLYLQMNSLRAEDTAVYYCARHRTSAGKIDYWGQWGQGTLVTVSSGGSSRSSSSGGGGSGGGGEIVLTQSPATLSLSPGERATLSCRASQSVSSSYLAWYQQKPGQAPRLLIYGASSRATGIPARFSGSGSGTDFTLTISRLEPEDFAVYYCQAWDSTTLVVFGQGTKVEIK

SEQ ID NO: 4773 - protein, 250 aa, synthetic construct
QVQLVESGGGVVQPGRSLRLSCAASGFTFSSYAMHWVRQAPGKGLEWVAVISYDGSNKYYADSVKGRFTISRDNSKNTLYLQMNSLRAEDTAVYYCARHSGGSLRGMDVWGQWGQGTLVTVSSGGSSRSSSSGGGGSGGGGEIVLTQSPATLSLSPGERATLSCRASQSVSSSYLAWYQQKPGQAPRLLIYGASSRATGIPARFSGSGSGTDFTLTISRLEPEDFAVYYCQTWDIGTYVVFGQGTKVEIK

SEQ ID NO: 4774 - protein, 250 aa, synthetic construct
QVQLVESGGGVVQPGRSLRLSCAASGFTFSSYAMHWVRQAPGKGLEWVAVISYDGSNKYYADSVKGRFTISRDNSKNTLYLQMNSLRAEDTAVYYCARHSSYYGNFDPWGQWGQGTLVTVSSGGSSRSSSSGGGGSGGGGEIVLTQSPATLSLSPGERATLSCRASQSVSSSYLAWYQQKPGQAPRLLIYGASSRATGIPARFSGSGSGTDFTLTISRLEPEDFAVYYCAAWDDSLNGYVFGQGTKVEIK

SEQ ID NO: 4775 - protein, 249 aa, synthetic construct
QVQLVESGGGVVQPGRSLRLSCAASGFTFSSYAMHWVRQAPGKGLEWVAVISYDGSNKYYADSVKGRFTISRDNSKNTLYLQMNSLRAEDTAVYYCARHTGAIYFADYWGQWGQGTLVTVSSGGSSRSSSSGGGGSGGGGEIVLTQSPATLSLSPGERATLSCRASQSVSSSYLAWYQQKPGQAPRLLIYGASSRATGIPARFSGSGSGTDFTLTISRLEPEDFAVYYCQQYNNWPPWTFGQGTKVEIK

SEQ ID NO: 4776 - protein, 251 aa, synthetic construct
QVQLVESGGGVVQPGRSLRLSCAASGFTFSSYAMHWVRQAPGKGLEWVAVISYDGSNKYYADSVKGRFTISRDNSKNTLYLQMNSLRAEDTAVYYCARHTGDSRVGVIDYWGQWGQGTLVTVSSGGSSRSSSSGGGGSGGGGEIVLTQSPATLSLSPGERATLSCRASQSVSSSYLAWYQQKPGQAPRLLIYGASSRATGIPARFSGSGSGTDFTLTISRLEPEDFAVYYCQAWDSSTYVVFGQGTKVEIK

SEQ ID NO: 4777 - protein, 254 aa, synthetic construct
QVQLVESGGGVVQPGRSLRLSCAASGFTFSSYAMHWVRQAPGKGLEWVAVISYDGSNKYYADSVKGRFTISRDNSKNTLYLQMNSLRAEDTAVYYCARHVITGSYGQGPFDDWGQWGQGTLVTVSSGGSSRSSSSGGGGSGGGGEIVLTQSPATLSLSPGERATLSCRASQSVSSSYLAWYQQKPGQAPRLLIYGASSRATGIPARFSGSGSGTDFTLTISRLEPEDFAVYYCQAWDSSSTHVVFGQGTKVEIK

SEQ ID NO: 4778 - protein, 251 aa, synthetic construct
QVQLVESGGGVVQPGRSLRLSCAASGFTFSSYAMHWVRQAPGKGLEWVAVISYDGSNKYYADSVKGRFTISRDNSKNTLYLQMNSLRAEDTAVYYCARHWGFRYFDFWGQWGQGTLVTVSSGGSSRSSSSGGGGSGGGGEIVLTQSPATLSLSPGERATLSCRASQSVSSSYLAWYQQKPGQAPRLLIYGASSRATGIPARFSGSGSGTDFTLTISRLEPEDFAVYYCGAYTRANPQTLYVFGQGTKVEIK

SEQ ID NO: 4779 - protein, 253 aa, synthetic construct
QVQLVESGGGVVQPGRSLRLSCAASGFTFSSYAMHWVRQAPGKGLEWVAVISYDGSNKYYADSVKGRFTISRDNSKNTLYLQMNSLRAEDTAVYYCARHYSRTSAPYYNAVDVWGQWGQGTLVTVSSGGSSRSSSSGGGGSGGGGEIVLTQSPATLSLSPGERATLSCRASQSVSSSYLAWYQQKPGQAPRLLIYGASSRATGIPARFSGSGSGTDFTLTISRLEPEDFAVYYCQQSYSPPLTFGQGTKVEIK

SEQ ID NO: 4780 - protein, 247 aa, synthetic construct
QVQLVESGGGVVQPGRSLRLSCAASGFTFSSYAMHWVRQAPGKGLEWVAVISYDGSNKYYADSVKGRFTISRDNSKNTLYLQMNSLRAEDTAVYYCARINRVRTFDIWGQWGQGTLVTVSSGGSSRSSSSGGGGSGGGGEIVLTQSPATLSLSPGERATLSCRASQSVSSSYLAWYQQKPGQAPRLLIYGASSRATGIPARFSGSGSGTDFTLTISRLEPEDFAVYYCQQANSFPPTFGQGTKVEIK

SEQ ID NO: 4781 - protein, 257 aa, synthetic construct; identical to SEQ ID NO: 4254

SEQ ID NO: 4782 - protein, 247 aa, synthetic construct
QVQLVESGGGVVQPGRSLRLSCAASGFTFSSYAMHWVRQAPGKGLEWVAVISYDGSNKYYADSVKGRFTISRDNSKNTLYLQMNSLRAEDTAVYYCARLNRLFALDPWGQWGQGTLVTVSSGGSSRSSSSGGGGSGGGGEIVLTQSPATLSLSPGERATLSCRASQSVSSSYLAWYQQKPGQAPRLLIYGASSRATGIPARFSGSGSGTDFTLTISRLEPEDFAVYYCQTWDSSGVVFGQGTKVEIK

SEQ ID NO: 4783 - protein, 250 aa, synthetic construct
QVQLVESGGGVVQPGRSLRLSCAASGFTFSSYAMHWVRQAPGKGLEWVAVISYDGSNKYYADSVKGRFTISRDNSKNTLYLQMNSLRAEDTAVYYCARLPAGIDAGFDLWGQWGQGTLVTVSSGGSSRSSSSGGGGSGGGGEIVLTQSPATLSLSPGERATLSCRASQSVSSSYLAWYQQKPGQAPRLLIYGASSRATGIPARFSGSGSGTDFTLTISRLEPEDFAVYYCESWDDKAYWVFGQGTKVEIK

SEQ ID NO: 4784 - protein, 255 aa, synthetic construct
QVQLVESGGGVVQPGRSLRLSCAASGFTFSSYAMHWVRQAPGKGLEWVAVISYDGSNKYYADSVKGRFTISRDNSKNTLYLQMNSLRAEDTAVYYCARLPGATSKSWYYTRGFDYWGQWGQGTLVTVSSGGSSRSSSSGGGGSGGGGEIVLTQSPATLSLSPGERATLSCRASQSVSSSYLAWYQQKPGQAPRLLIYGASSRATGIPARFSGSGSGTDFTLTISRLEPEDFAVYYCQTWGTGSLVFGQGTKVEIK

SEQ ID NO: 4785 - protein, 251 aa, synthetic construct
QVQLVESGGGVVQPGRSLRLSCAASGFTFSSYAMHWVRQAPGKGLEWVAVISYDGSNKYYADSVKGRFTISRDNSKNTLYLQMNSLRAEDTAVYYCARLRGSYDYEAFDYWGQWGQGTLVTVSSGGSSRSSSSGGGGSGGGGEIVLTQSPATLSLSPGERATLSCRASQSVSSSYLAWYQQKPGQAPRLLIYGASSRATGIPARFSGSGSGTDFTLTISRLEPEDFAVYYCQQYNNWPRYTFGQGTKVEIK

SEQ ID NO: 4786 - protein, 251 aa, synthetic construct
QVQLVESGGGVVQPGRSLRLSCAASGFTFSSYAMHWVRQAPGKGLEWVAVISYDGSNKYYADSVKGRFTISRDNSKNTLYLQMNSLRAEDTAVYYCARLRGSYYRNWFDPWGQWGQGTLVTVSSGGSSRSSSSGGGGSGGGGEIVLTQSPATLSLSPGERATLSCRASQSVSSSYLAWYQQKPGQAPRLLIYGASSRATGIPARFSGSGSGTDFTLTISRLEPEDFAVYYCASFDLDALWVFGQGTKVEIK

SEQ ID NO: 4787 - protein, 247 aa, synthetic construct
QVQLVESGGGVVQPGRSLRLSCAASGFTFSSYAMHWVRQAPGKGLEWVAVISYDGSNKYYADSVKGRFTISRDNSKNTLYLQMNSLRAEDTAVYYCARLTPGFDYWGQWGQGTLVTVSSGGSSRSSSSGGGGSGGGGEIVLTQSPATLSLSPGERATLSCRASQSVSSSYLAWYQQKPGQAPRLLIYGASSRATGIPARFSGSGSGTDFTLTISRLEPEDFAVYYCQVWDSRADHWVFGQGTKVEIK

SEQ ID NO: 4788 - protein, 249 aa, synthetic construct
QVQLVESGGGVVQPGRSLRLSCAASGFTFSSYAMHWVRQAPGKGLEWVAVISYDGSNKYYADSVKGRFTISRDNSKNTLYLQMNSLRAEDTAVYYCARMGTIPRHHFDYWGQWGQGTLVTVSSGGSSRSSSSGGGGSGGGGEIVLTQSPATLSLSPGERATLSCRASQSVSSSYLAWYQQKPGQAPRLLIYGASSRATGIPARFSGSGSGTDFTLTISRLEPEDFAVYYCQQYDNPPVSFGQGTKVEIK

SEQ ID NO: 4789 - protein, 248 aa, synthetic construct
QVQLVESGGGVVQPGRSLRLSCAASGFTFSSYAMHWVRQAPGKGLEWVAVISYDGSNKYYADSVKGRFTISRDNSKNTLYLQMNSLRAEDTAVYYCARMQRYGMDVWGQWGQGTLVTVSSGGSSRSSSSGGGGSGGGGEIVLTQSPATLSLSPGERATLSCRASQSVSSSYLAWYQQKPGQAPRLLIYGASSRATGIPARFSGSGSGTDFTLTISRLEPEDFAVYYCGTWDSSLNPVVFGQGTKVEIK

SEQ ID NO: 4790 - protein, 249 aa, synthetic construct
QVQLVESGGGVVQPGRSLRLSCAASGFTFSSYAMHWVRQAPGKGLEWVAVISYDGSNKYYADSVKGRFTISRDNSKNTLYLQMNSLRAEDTAVYYCARMQRYGMDVWGQWGQGTLVTVSSGGSSRSSSSGGGGSGGGGEIVLTQSPATLSLSPGERATLSCRASQSVSSSYLAWYQQKPGQAPRLLIYGASSRATGIPARFSGSGSGTDFTLTISRLEPEDFAVYYCGTWDSSLSAVAVFGQGTKVEIK

SEQ ID NO: 4791 - protein, 249 aa, synthetic construct
QVQLVESGGGVVQPGRSLRLSCAASGFTFSSYAMHWVRQAPGKGLEWVAVISYDGSNKYYADSVKGRFTISRDNSKNTLYLQMNSLRAEDTAVYYCARMQRYGMDVWGQWGQGTLVTVSSGGSSRSSSSGGGGSGGGGEIVLTQSPATLSLSPGERATLSCRASQSVSSSYLAWYQQKPGQAPRLLIYGASSRATGIPARFSGSGSGTDFTLTISRLEPEDFAVYYCGTWDSSSSHLKVFGQGTKVEIK

SEQ ID NO: 4792 - protein, 244 aa, synthetic construct
QVQLVESGGGVVQPGRSLRLSCAASGFTFSSYAMHWVRQAPGKGLEWVAVISYDGSNKYYADSVKGRFTISRDNSKNTLYLQMNSLRAEDTAVYYCARMQRYGMDVWGQWGQGTLVTVSSGGSSRSSSSGGGGSGGGGEIVLTQSPATLSLSPGERATLSCRASQSVSSSYLAWYQQKPGQAPRLLIYGASSRATGIPARFSGSGSGTDFTLTISRLEPEDFAVYYCQTWGTVVFGQGTKVEIK

SEQ ID NO: 4793 - protein, 245 aa, synthetic construct
QVQLVESGGGVVQPGRSLRLSCAASGFTFSSYAMHWVRQAPGKGLEWVAVISYDGSNKYYADSVKGRFTISRDNSKNTLYLQMNSLRAEDTAVYYCARMRPELDYWGQWGQGTLVTVSSGGSSRSSSSGGGGSGGGGEIVLTQSPATLSLSPGERATLSCRASQSVSSSYLAWYQQKPGQAPRLLIYGASSRATGIPARFSGSGSGTDFTLTISRLEPEDFAVYYCQTWDSSTVVFGQGTKVEIK

SEQ ID NO: 4794 - protein, 249 aa, synthetic construct
QVQLVESGGGVVQPGRSLRLSCAASGFTFSSYAMHWVRQAPGKGLEWVAVISYDGSNKYYADSVKGRFTISRDNSKNTLYLQMNSLRAEDTAVYYCARMRRSSYFDYWGQWGQGTLVTVSSGGSSRSSSSGGGGSGGGGEIVLTQSPATLSLSPGERATLSCRASQSVSSSYLAWYQQKPGQAPRLLIYGASSRATGIPARFSGSGSGTDFTLTISRLEPEDFAVYYCSSYTSSSSLWVFGQGTKVEIK

SEQ ID NO: 4795 - protein, 248 aa, synthetic construct
QVQLVESGGGVVQPGRSLRLSCAASGFTFSSYAMHWVRQAPGKGLEWVAVISYDGSNKYYADSVKGRFTISRDNSKNTLYLQMNSLRAEDTAVYYCARMRSGGWFDYWGQWGQGTLVTVSSGGSSRSSSSGGGGSGGGGEIVLTQSPATLSLSPGERATLSCRASQSVSSSYLAWYQQKPGQAPRLLIYGASSRATGIPARFSGSGSGTDFTLTISRLEPEDFAVYYCQAWDSSPSVVFGQGTKVEIK

SEQ ID NO: 4796 - protein, 247 aa, synthetic construct
QVQLVESGGGVVQPGRSLRLSCAASGFTFSSYAMHWVRQAPGKGLEWVAVISYDGSNKYYADSVKGRFTISRDNSKNTLYLQMNSLRAEDTAVYYCARMRSGGWFDYWGQWGQGTLVTVSSGGSSRSSSSGGGGSGGGGEIVLTQSPATLSLSPGERATLSCRASQSVSSSYLAWYQQKPGQAPRLLIYGASSRATGIPARFSGSGSGTDFTLTISRLEPEDFAVYYCQTWASSGWVFGQGTKVEIK

SEQ ID NO: 4797 - protein, 248 aa, synthetic construct
QVQLVESGGGVVQPGRSLRLSCAASGFTFSSYAMHWVRQAPGKGLEWVAVISYDGSNKYYADSVKGRFTISRDNSKNTLYLQMNSLRAEDTAVYYCARMSAGGKLDYWGQWGQGTLVTVSSGGSSRSSSSGGGGSGGGGEIVLTQSPATLSLSPGERATLSCRASQSVSSSYLAWYQQKPGQAPRLLIYGASSRATGIPARFSGSGSGTDFTLTISRLEPEDFAVYYCQSVDSSGTWVFGQGTKVEIK

SEQ ID NO: 4798 - protein, 249 aa, synthetic construct
QVQLVESGGGVVQPGRSLRLSCAASGFTFSSYAMHWVRQAPGKGLEWVAVISYDGSNKYYADSVKGRFTISRDNSKNTLYLQMNSLRAEDTAVYYCARNGRTVTKGMDVWGQWGQGTLVTVSSGGSSRSSSSGGGGSGGGGEIVLTQSPATLSLSPGERATLSCRASQSVSSSYLAWYQQKPGQAPRLLIYGASSRATGIPARFSGSGSGTDFTLTISRLEPEDFAVYYCQQVNSFPPTFGQGTKVEIK

SEQ ID NO: 4799 - protein, 250 aa, synthetic construct
QVQLVESGGGVVQPGRSLRLSCAASGFTFSSYAMHWVRQAPGKGLEWVAVISYDGSNKYYADSVKGRFTISRDNSKNTLYLQMNSLRAEDTAVYYCARNGRTVTKGMDVWGQWGQGTLVTVSSGGSSRSSSSGGGGSGGGGEIVLTQSPATLSLSPGERATLSCRASQSVSSSYLAWYQQKPGQAPRLLIYGASSRATGIPARFSGSGSGTDFTLTISRLEPEDFAVYYCQQYDSSPPITFGQGTKVEIK

SEQ ID NO: 4800 - protein, 248 aa, synthetic construct
QVQLVESGGGVVQPGRSLRLSCAASGFTFSSYAMHWVRQAPGKGLEWVAVISYDGSNKYYADSVKGRFTISRDNSKNTLYLQMNSLRAEDTAVYYCARNRGWTGSFDLWGQWGQGTLVTVSSGGSSRSSSSGGGGSGGGGEIVLTQSPATLSLSPGERATLSCRASQSVSSSYLAWYQQKPGQAPRLLIYGASSRATGIPARFSGSGSGTDFTLTISRLEPEDFAVYYCQQSNSPPITFGQGTKVEIK

SEQ ID NO: 4801 - protein, 250 aa, synthetic construct
QVQLVESGGGVVQPGRSLRLSCAASGFTFSSYAMHWVRQAPGKGLEWVAVISYDGSNKYYADSVKGRFTISRDNSKNTLYLQMNSLRAEDTAVYYCARNRRLSPGGGFDIWGQWGQGTLVTVSSGGSSRSSSSGGGGSGGGGEIVLTQSPATLSLSPGERATLSCRASQSVSSSYLAWYQQKPGQAPRLLIYGASSRATGIPARFSGSGSGTDFTLTISRLEPEDFAVYYCQQSDSPPITFGQGTKVEIK

SEQ ID NO: 4802 - protein, 250 aa, synthetic construct
QVQLVESGGGVVQPGRSLRLSCAASGFTFSSYAMHWVRQAPGKGLEWVAVISYDGSNKYYADSVKGRFTISRDNSKNTLYLQMNSLRAEDTAVYYCARNRRLSPGGGFDIWGQWGQGTLVTVSSGGSSRSSSSGGGGSGGGGEIVLTQSPATLSLSPGERATLSCRASQSVSSSYLAWYQQKPGQAPRLLIYGASSRATGIPARFSGSGSGTDFTLTISRLEPEDFAVYYCQQSYSPPPTFGQGTKVEIK

SEQ ID NO: 4803 - protein, 250 aa, synthetic construct
QVQLVESGGGVVQPGRSLRLSCAASGFTFSSYAMHWVRQAPGKGLEWVAVISYDGSNKYYADSVKGRFTISRDNSKNTLYLQMNSLRAEDTAVYYCARNSGQGDLNPWGQWGQGTLVTVSSGGSSRSSSSGGGGSGGGGEIVLTQSPATLSLSPGERATLSCRASQSVSSSYLAWYQQKPGQAPRLLIYGASSRATGIPARFSGSGSGTDFTLTISRLEPEDFAVYYCGTWDVSSDPAWVFGQGTKVEIK

SEQ ID NO: 4804 - protein, 248 aa, synthetic construct
QVQLVESGGGVVQPGRSLRLSCAASGFTFSSYAMHWVRQAPGKGLEWVAVISYDGSNKYYADSVKGRFTISRDNSKNTLYLQMNSLRAEDTAVYYCARNSGWYGVSWGQWGQGTLVTVSSGGSSRSSSSGGGGSGGGGEIVLTQSPATLSLSPGERATLSCRASQSVSSSYLAWYQQKPGQAPRLLIYGASSRATGIPARFSGSGSGTDFTLTISRLEPEDFAVYYCQVWDSSSDQWVFGQGTKVEIK

SEQ ID NO: 4805 - protein, 246 aa, synthetic construct
QVQLVESGGGVVQPGRSLRLSCAASGFTFSSYAMHWVRQAPGKGLEWVAVISYDGSNKYYADSVKGRFTISRDNSKNTLYLQMNSLRAEDTAVYYCARNSSGYYSYWGQWGQGTLVTVSSGGSSRSSSSGGGGSGGGGEIVLTQSPATLSLSPGERATLSCRASQSVSSSYLAWYQQKPGQAPRLLIYGASSRATGIPARFSGSGSGTDFTLTISRLEPEDFAVYYCQTWGTGIRIFGQGTKVEIK

SEQ ID NO: 4806 - protein, 253 aa, synthetic construct
QVQLVESGGGVVQPGRSLRLSCAASGFTFSSYAMHWVRQAPGKGLEWVAVISYDGSNKYYADSVKGRFTISRDNSKNTLYLQMNSLRAEDTAVYYCARPKRTVLGSTRFDIWGQWGQGTLVTVSSGGSSRSSSSGGGGSGGGGEIVLTQSPATLSLSPGERATLSCRASQSVSSSYLAWYQQKPGQAPRLLIYGASSRATGIPARFSGSGSGTDFTLTISRLEPEDFAVYYCGAWDSSDNARVFGQGTKVEIK

SEQ ID NO: 4807 - protein, 249 aa, synthetic construct
QVQLVESGGGVVQPGRSLRLSCAASGFTFSSYAMHWVRQAPGKGLEWVAVISYDGSNKYYADSVKGRFTISRDNSKNTLYLQMNSLRAEDTAVYYCARRAPGYSSGIDYWGQWGQGTLVTVSSGGSSRSSSSGGGGSGGGGEIVLTQSPATLSLSPGERATLSCRASQSVSSSYLAWYQQKPGQAPRLLIYGASSRATGIPARFSGSGSGTDFTLTISRLEPEDFAVYYCQTWGTGIRVFGQGTKVEIK

SEQ ID NO: 4808 - protein, 249 aa, synthetic construct
QVQLVESGGGVVQPGRSLRLSCAASGFTFSSYAMHWVRQAPGKGLEWVAVISYDGSNKYYADSVKGRFTISRDNSKNTLYLQMNSLRAEDTAVYYCARRAVGLTLDYWGQWGQGTLVTVSSGGSSRSSSSGGGGSGGGGEIVLTQSPATLSLSPGERATLSCRASQSVSSSYLAWYQQKPGQAPRLLIYGASSRATGIPARFSGSGSGTDFTLTISRLEPEDFAVYYCQVWDSSSDHQVFGQGTKVEIK

SEQ ID NO: 4809 - protein, 250 aa, synthetic construct
QVQLVESGGGVVQPGRSLRLSCAASGFTFSSYAMHWVRQAPGKGLEWVAVISYDGSNKYYADSVKGRFTISRDNSKNTLYLQMNSLRAEDTAVYYCARRDPGTWQFDPWGQWGQGTLVTVSSGGSSRSSSSGGGGSGGGGEIVLTQSPATLSLSPGERATLSCRASQSVSSSYLAWYQQKPGQAPRLLIYGASSRATGIPARFSGSGSGTDFTLTISRLEPEDFAVYYCMSYTHANTVVAFGQGTKVEIK

SEQ ID NO: 4810 - protein, 254 aa, synthetic construct
QVQLVESGGGVVQPGRSLRLSCAASGFTFSSYAMHWVRQAPGKGLEWVAVISYDGSNKYYADSVKGRFTISRDNSKNTLYLQMNSLRAEDTAVYYCARRDYSNSYYYYYGMDVWGQWGQGTLVTVSSGGSSRSSSSGGGGSGGGGEIVLTQSPATLSLSPGERATLSCRASQSVSSSYLAWYQQKPGQAPRLLIYGASSRATGIPARFSGSGSGTDFTLTISRLEPEDFAVYYCSSYTSNAMRIFGQGTKVEIK

SEQ ID NO: 4811 - protein, 250 aa, synthetic construct
QVQLVESGGGVVQPGRSLRLSCAASGFTFSSYAMHWVRQAPGKGLEWVAVISYDGSNKYYADSVKGRFTISRDNSKNTLYLQMNSLRAEDTAVYYCARRGGGHDGFDVWGQWGQGTLVTVSSGGSSRSSSSGGGGSGGGGEIVLTQSPATLSLSPGERATLSCRASQSVSSSYLAWYQQKPGQAPRLLIYGASSRATGIPARFSGSGSGTDFTLTISRLEPEDFAVYYCQTWDTSIPHVVFGQGTKVEIK

SEQ ID NO: 4812 - protein, 250 aa, synthetic construct
QVQLVESGGGVVQPGRSLRLSCAASGFTFSSYAMHWVRQAPGKGLEWVAVISYDGSNKYYADSVKGRFTISRDNSKNTLYLQMNSLRAEDTAVYYCARRLVSSDSPYFDYWGQWGQGTLVTVSSGGSSRSSSSGGGGSGGGGEIVLTQSPATLSLSPGERATLSCRASQSVSSSYLAWYQQKPGQAPRLLIYGASSRATGIPARFSGSGSGTDFTLTISRLEPEDFAVYYCENWDSNTRVFGQGTKVEIK

SEQ ID NO: 4813 - protein, 245 aa, synthetic construct
QVQLVESGGGVVQPGRSLRLSCAASGFTFSSYAMHWVRQAPGKGLEWVAVISYDGSNKYYADSVKGRFTISRDNSKNTLYLQMNSLRAEDTAVYYCARRMSGIDYWGQWGQGTLVTVSSGGSSRSSSSGGGGSGGGGEIVLTQSPATLSLSPGERATLSCRASQSVSSSYLAWYQQKPGQAPRLLIYGASSRATGIPARFSGSGSGTDFTLTISRLEPEDFAVYYCKQYNNLPITFGQGTKVEIK

SEQ ID NO: 4814 - protein, 245 aa, synthetic construct
QVQLVESGGGVVQPGRSLRLSCAASGFTFSSYAMHWVRQAPGKGLEWVAVISYDGSNKYYADSVKGRFTISRDNSKNTLYLQMNSLRAEDTAVYYCARRMSGIDYWGQWGQGTLVTVSSGGSSRSSSSGGGGSGGGGEIVLTQSPATLSLSPGERATLSCRASQSVSSSYLAWYQQKPGQAPRLLIYGASSRATGIPARFSGSGSGTDFTLTISRLEPEDFAVYYCQQYDNLPLTFGQGTKVEIK

SEQ ID NO: 4815 - protein, 245 aa, synthetic construct
QVQLVESGGGVVQPGRSLRLSCAASGFTFSSYAMHWVRQAPGKGLEWVAVISYDGSNKYYADSVKGRFTISRDNSKNTLYLQMNSLRAEDTAVYYCARRMSGIDYWGQWGQGTLVTVSSGGSSRSSSSGGGGSGGGGEIVLTQSPATLSLSPGERATLSCRASQSVSSSYLAWYQQKPGQAPRLLIYGASSRATGIPARFSGSGSGTDFTLTISRLEPEDFAVYYCQQYNNWPLTFGQGTKVEIK

SEQ ID NO: 4816 - protein, 245 aa, synthetic construct
QVQLVESGGGVVQPGRSLRLSCAASGFTFSSYAMHWVRQAPGKGLEWVAVISYDGSNKYYADSVKGRFTISRDNSKNTLYLQMNSLRAEDTAVYYCARRMSGIDYWGQWGQGTLVTVSSGGSSRSSSSGGGGSGGGGEIVLTQSPATLSLSPGERATLSCRASQSVSSSYLAWYQQKPGQAPRLLIYGASSRATGIPARFSGSGSGTDFTLTISRLEPEDFAVYYCQQYNRFPLIFGQGTKVEIK

SEQ ID NO: 4817 - protein, 245 aa, synthetic construct
QVQLVESGGGVVQPGRSLRLSCAASGFTFSSYAMHWVRQAPGKGLEWVAVISYDGSNKYYADSVKGRFTISRDNSKNTLYLQMNSLRAEDTAVYYCARRMSGIDYWGQWGQGTLVTVSSGGSSRSSSSGGGGSGGGGEIVLTQSPATLSLSPGERATLSCRASQSVSSSYLAWYQQKPGQAPRLLIYGASSRATGIPARFSGSGSGTDFTLTISRLEPEDFAVYYCQQYNSFPLTFGQGTKVEIK

SEQ ID NO: 4818 - protein, 250 aa, synthetic construct
QVQLVESGGGVVQPGRSLRLSCAASGFTFSSYAMHWVRQAPGKGLEWVAVISYDGSNKYYADSVKGRFTISRDNSKNTLYLQMNSLRAEDTAVYYCARRNMLRLGRAFDSWGQWGQGTLVTVSSGGSSRSSSSGGGGSGGGGEIVLTQSPATLSLSPGERATLSCRASQSVSSSYLAWYQQKPGQAPRLLIYGASSRATGIPARFSGSGSGTDFTLTISRLEPEDFAVYYCQTWGTGIRVFGQGTKVEIK

SEQ ID NO: 4819 - protein, 250 aa, synthetic construct
QVQLVESGGGVVQPGRSLRLSCAASGFTFSSYAMHWVRQAPGKGLEWVAVISYDGSNKYYADSVKGRFTISRDNSKNTLYLQMNSLRAEDTAVYYCARRPTYGVPMDYWGQWGQGTLVTVSSGGSSRSSSSGGGGSGGGGEIVLTQSPATLSLSPGERATLSCRASQSVSSSYLAWYQQKPGQAPRLLIYGASSRATGIPARFSGSGSGTDFTLTISRLEPEDFAVYYCGTWDSSLSAVVFGQGTKVEIK

SEQ ID NO: 4820 - protein, 252 aa, synthetic construct
QVQLVESGGGVVQPGRSLRLSCAASGFTFSSYAMHWVRQAPGKGLEWVAVISYDGSNKYYADSVKGRFTISRDNSKNTLYLQMNSLRAEDTAVYYCARRRIGSFSLGPFDPWGQWGQGTLVTVSSGGSSRSSSSGGGGSGGGGEIVLTQSPATLSLSPGERATLSCRASQSVSSSYLAWYQQKPGQAPRLLIYGASSRATGIPARFSGSGSGTDFTLTISRLEPEDFAVYYCSSYGGYNNYVFGQGTKVEIK

SEQ ID NO: 4821 - protein, 258 aa, synthetic construct
QVQLVESGGGVVQPGRSLRLSCAASGFTFSSYAMHWVRQAPGKGLEWVAVISYDGSNKYYADSVKGRFTISRDNSKNTLYLQMNSLRAEDTAVYYCARSGVHYRAVGGSARLTDYMDVWGQWGQGTLVTVSSGGSSRSSSSGGGGSGGGGEIVLTQSPATLSLSPGERATLSCRASQSVSSSYLAWYQQKPGQAPRLLIYGASSRATGIPARFSGSGSGTDFTLTISRLEPEDFAVYYCQHYDNWPPTFGQGTKVEIK

SEQ ID NO: 4822 - protein, 245 aa, synthetic construct
QVQLVESGGGVVQPGRSLRLSCAASGFTFSSYAMHWVRQAPGKGLEWVAVISYDGSNKYYADSVKGRFTISRDNSKNTLYLQMNSLRAEDTAVYYCARSHGHFDYWGQWGQGTLVTVSSGGSSRSSSSGGGGSGGGGEIVLTQSPATLSLSPGERATLSCRASQSVSSSYLAWYQQKPGQAPRLLIYGASSRATGIPARFSGSGSGTDFTLTISRLEPEDFAVYYCQQYNNFPLTFGQGTKVEIK

SEQ ID NO: 4823 - protein, 249 aa, synthetic construct
QVQLVESGGGVVQPGRSLRLSCAASGFTFSSYAMHWVRQAPGKGLEWVAVISYDGSNKYYADSVKGRFTISRDNSKNTLYLQMNSLRAEDTAVYYCARSIAAAYAFDIWGQWGQGTLVTVSSGGSSRSSSSGGGGSGGGGEIVLTQSPATLSLSPGERATLSCRASQSVSSSYLAWYQQKPGQAPRLLIYGASSRATGIPARFSGSGSGTDFTLTISRLEPEDFAVYYCQQNYSTPPWTFGQGTKVEIK

SEQ ID NO: 4824 - protein, 257 aa, synthetic construct
QVQLVESGGGVVQPGRSLRLSCAASGFTFSSYAMHWVRQAPGKGLEWVAVISYDGSNKYYADSVKGRFTISRDNSKNTLYLQMNSLRAEDTAVYYCARSKYHYYGLSNVTYGAGFDYWGQWGQGTLVTVSSGGSSRSSSSGGGGSGGGGEIVLTQSPATLSLSPGERATLSCRASQSVSSSYLAWYQQKPGQAPRLLIYGASSRATGIPARFSGSGSGTDFTLTISRLEPEDFAVYYCQQYNPPPVTFGQGTKVEIK

SEQ ID NO: 4825 - protein, 246 aa, synthetic construct
QVQLVESGGGVVQPGRSLRLSCAASGFTFSSYAMHWVRQAPGKGLEWVAVISYDGSNKYYADSVKGRFTISRDNSKNTLYLQMNSLRAEDTAVYYCARSPGLRGNDYWGQWGQGTLVTVSSGGSSRSSSSGGGGSGGGGEIVLTQSPATLSLSPGERATLSCRASQSVSSSYLAWYQQKPGQAPRLLIYGASSRATGIPARFSGSGSGTDFTLTISRLEPEDFAVYYCGSYGAVGVFGQGTKVEIK

SEQ ID NO: 4826 - protein, 252 aa, synthetic construct
QVQLVESGGGVVQPGRSLRLSCAASGFTFSSYAMHWVRQAPGKGLEWVAVISYDGSNKYYADSVKGRFTISRDNSKNTLYLQMNSLRAEDTAVYYCARSQPRPRYNYGKFDPWGQWGQGTLVTVSSGGSSRSSSSGGGGSGGGGEIVLTQSPATLSLSPGERATLSCRASQSVSSSYLAWYQQKPGQAPRLLIYGASSRATGIPARFSGSGSGTDFTLTISRLEPEDFAVYYCQVWDSSTRVFGQGTKVEIK

SEQ ID NO: 4827 - protein, 247 aa, synthetic construct
QVQLVESGGGVVQPGRSLRLSCAASGFTFSSYAMHWVRQAPGKGLEWVAVISYDGSNKYYADSVKGRFTISRDNSKNTLYLQMNSLRAEDTAVYYCARSRLGDAFDIWGQWGQGTLVTVSSGGSSRSSSSGGGGSGGGGEIVLTQSPATLSLSPGERATLSCRASQSVSSSYLAWYQQKPGQAPRLLIYGASSRATGIPARFSGSGSGTDFTLTISRLEPEDFAVYYCQQYDNLPLTFGQGTKVEIK

SEQ ID NO: 4828 - protein, 256 aa, synthetic construct
QVQLVESGGGVVQPGRSLRLSCAASGFTFSSYAMHWVRQAPGKGLEWVAVISYDGSNKYYADSVKGRFTISRDNSKNTLYLQMNSLRAEDTAVYYCARSTFYYGSGRPYSAWFDPWGQWGQGTLVTVSSGGSSRSSSSGGGGSGGGGEIVLTQSPATLSLSPGERATLSCRASQSVSSSYLAWYQQKPGQAPRLLIYGASSRATGIPARFSGSGSGTDFTLTISRLEPEDFAVYYCQTWDSRKTVVFGQGTKVEIK

SEQ ID NO: 4829 - protein, 256 aa, synthetic construct
QVQLVESGGGVVQPGRSLRLSCAASGFTFSSYAMHWVRQAPGKGLEWVAVISYDGSNKYYADSVKGRFTISRDNSKNTLYLQMNSLRAEDTAVYYCARTGGSSGGFALYGFGIWGQWGQGTLVTVSSGGSSRSSSSGGGGSGGGGEIVLTQSPATLSLSPGERATLSCRASQSVSSSYLAWYQQKPGQAPRLLIYGASSRATGIPARFSGSGSGTDFTLTISRLEPEDFAVYYCQVWDSSSDLPVVFGQGTKVEIK

SEQ ID NO: 4830 - protein, 248 aa, synthetic construct
QVQLVESGGGVVQPGRSLRLSCAASGFTFSSYAMHWVRQAPGKGLEWVAVISYDGSNKYYADSVKGRFTISRDNSKNTLYLQMNSLRAEDTAVYYCARTLPRAGAFDIWGQWGQGTLVTVSSGGSSRSSSSGGGGSGGGGEIVLTQSPATLSLSPGERATLSCRASQSVSSSYLAWYQQKPGQAPRLLIYGASSRATGIPARFSGSGSGTDFTLTISRLEPEDFAVYYCQQANSFPPTFGQGTKVEIK

SEQ ID NO: 4831 - protein, 248 aa, synthetic construct
QVQLVESGGGVVQPGRSLRLSCAASGFTFSSYAMHWVRQAPGKGLEWVAVISYDGSNKYYADSVKGRFTISRDNSKNTLYLQMNSLRAEDTAVYYCARTLPRAGAFDIWGQWGQGTLVTVSSGGSSRSSSSGGGGSGGGGEIVLTQSPATLSLSPGERATLSCRASQSVSSSYLAWYQQKPGQAPRLLIYGASSRATGIPARFSGSGSGTDFTLTISRLEPEDFAVYYCQQAYSPPPTFGQGTKVEIK

SEQ ID NO: 4832 - protein, 248 aa, synthetic construct
QVQLVESGGGVVQPGRSLRLSCAASGFTFSSYAMHWVRQAPGKGLEWVAVISYDGSNKYYADSVKGRFTISRDNSKNTLYLQMNSLRAEDTAVYYCARTLPRAGAFDIWGQWGQGTLVTVSSGGSSRSSSSGGGGSGGGGEIVLTQSPATLSLSPGERATLSCRASQSVSSSYLAWYQQKPGQAPRLLIYGASSRATGIPARFSGSGSGTDFTLTISRLEPEDFAVYYCQQSNSPPPTFGQGTKVEIK

SEQ ID NO: 4833 - protein, 251 aa, synthetic construct
QVQLVESGGGVVQPGRSLRLSCAASGFTFSSYAMHWVRQAPGKGLEWVAVISYDGSNKYYADSVKGRFTISRDNSKNTLYLQMNSLRAEDTAVYYCARTRGLYFGPWGQWGQGTLVTVSSGGSSRSSSSGGGGSGGGGEIVLTQSPATLSLSPGERATLSCRASQSVSSSYLAWYQQKPGQAPRLLIYGASSRATGIPARFSGSGSGTDFTLTISRLEPEDFAVYYCGTWDSSLLSSSLVVFGQGTKVEIK

SEQ ID NO: 4834 - protein, 249 aa, synthetic construct
QVQLVESGGGVVQPGRSLRLSCAASGFTFSSYAMHWVRQAPGKGLEWVAVISYDGSNKYYADSVKGRFTISRDNSKNTLYLQMNSLRAEDTAVYYCARTRGLYFGPWGQWGQGTLVTVSSGGSSRSSSSGGGGSGGGGEIVLTQSPATLSLSPGERATLSCRASQSVSSSYLAWYQQKPGQAPRLLIYGASSRATGIPARFSGSGSGTDFTLTISRLEPEDFAVYYCNSWDSRGGHLVVFGQGTKVEIK

SEQ ID NO: 4835 - protein, 249 aa, synthetic construct
QVQLVESGGGVVQPGRSLRLSCAASGFTFSSYAMHWVRQAPGKGLEWVAVISYDGSNKYYADSVKGRFTISRDNSKNTLYLQMNSLRAEDTAVYYCARTRGLYFGPWGQWGQGTLVTVSSGGSSRSSSSGGGGSGGGGEIVLTQSPATLSLSPGERATLSCRASQSVSSSYLAWYQQKPGQAPRLLIYGASSRATGIPARFSGSGSGTDFTLTISRLEPEDFAVYYCQVWDYSSDLHVVFGQGTKVEIK

SEQ ID NO: 4836 - protein, 247 aa, synthetic construct
QVQLVESGGGVVQPGRSLRLSCAASGFTFSSYAMHWVRQAPGKGLEWVAVISYDGSNKYYADSVKGRFTISRDNSKNTLYLQMNSLRAEDTAVYYCARTRGSYFDYWGQWGQGTLVTVSSGGSSRSSSSGGGGSGGGGEIVLTQSPATLSLSPGERATLSCRASQSVSSSYLAWYQQKPGQAPRLLIYGASSRATGIPARFSGSGSGTDFTLTISRLEPEDFAVYYCQAWDSTPSVVFGQGTKVEIK

SEQ ID NO: 4837 - protein, 252 aa, synthetic construct
QVQLVESGGGVVQPGRSLRLSCAASGFTFSSYAMHWVRQAPGKGLEWVAVISYDGSNKYYADSVKGRFTISRDNSKNTLYLQMNSLRAEDTAVYYCARTSSGSTAAPIGYWGQWGQGTLVTVSSGGSSRSSSSGGGGSGGGGEIVLTQSPATLSLSPGERATLSCRASQSVSSSYLAWYQQKPGQAPRLLIYGASSRATGIPARFSGSGSGTDFTLTISRLEPEDFAVYYCAAWDDSGGSPVFGQGTKVEIK

SEQ ID NO: 4838 - protein, 250 aa, synthetic construct
QVQLVESGGGVVQPGRSLRLSCAASGFTFSSYAMHWVRQAPGKGLEWVAVISYDGSNKYYADSVKGRFTISRDNSKNTLYLQMNSLRAEDTAVYYCARTVGPYGRTYFDYWGQWGQGTLVTVSSGGSSRSSSSGGGGSGGGGEIVLTQSPATLSLSPGERATLSCRASQSVSSSYLAWYQQKPGQAPRLLIYGASSRATGIPARFSGSGSGTDFTLTISRLEPEDFAVYYCQQANSPPITFGQGTKVEIK

SEQ ID NO: 4839 - protein, 251 aa, synthetic construct
QVQLVESGGGVVQPGRSLRLSCAASGFTFSSYAMHWVRQAPGKGLEWVAVISYDGSNKYYADSVKGRFTISRDNSKNTLYLQMNSLRAEDTAVYYCARVARGGYKTADLWGQWGQGTLVTVSSGGSSRSSSSGGGGSGGGGEIVLTQSPATLSLSPGERATLSCRASQSVSSSYLAWYQQKPGQAPRLLIYGASSRATGIPARFSGSGSGTDFTLTISRLEPEDFAVYYCLVWDSSSDHVIFGQGTKVEIK

SEQ ID NO: 4840 - protein, 249 aa, synthetic construct
QVQLVESGGGVVQPGRSLRLSCAASGFTFSSYAMHWVRQAPGKGLEWVAVISYDGSNKYYADSVKGRFTISRDNSKNTLYLQMNSLRAEDTAVYYCARVARGGYKTADLWGQWGQGTLVTVSSGGSSRSSSSGGGGSGGGGEIVLTQSPATLSLSPGERATLSCRASQSVSSSYLAWYQQKPGQAPRLLIYGASSRATGIPARFSGSGSGTDFTLTISRLEPEDFAVYYCQQYYGNPHTFGQGTKVEIK

SEQ ID NO: 4841 - protein, 252 aa, synthetic construct
QVQLVESGGGVVQPGRSLRLSCAASGFTFSSYAMHWVRQAPGKGLEWVAVISYDGSNKYYADSVKGRFTISRDNSKNTLYLQMNSLRAEDTAVYYCARVARGGYKTADLWGQWGQGTLVTVSSGGSSRSSSSGGGGSGGGGEIVLTQSPATLSLSPGERATLSCRASQSVSSSYLAWYQQKPGQAPRLLIYGASSRATGIPARFSGSGSGTDFTLTISRLEPEDFAVYYCQSYDNSLRGSKVFGQGTKVEIK

SEQ ID NO: 4842 - protein, 262 aa, synthetic construct
QVQLVESGGGVVQPGRSLRLSCAASGFTFSSYAMHWVRQAPGKGLEWVAVISYDGSNKYYADSVKGRFTISRDNSKNTLYLQMNSLRAEDTAVYYCARVARGSYTSWVDSPYPASARYYMDVWGQWGQGTLVTVSSGGSSRSSSSGGGGSGGGGEIVLTQSPATLSLSPGERATLSCRASQSVSSSYLAWYQQKPGQAPRLLIYGASSRATGIPARFSGSGSGTDFTLTISRLEPEDFAVYYCQTWGTGIRVFGQGTKVEIK

SEQ ID NO: 4843 - protein, 251 aa, synthetic construct
QVQLVESGGGVVQPGRSLRLSCAASGFTFSSYAMHWVRQAPGKGLEWVAVISYDGSNKYYADSVKGRFTISRDNSKNTLYLQMNSLRAEDTAVYYCARVGWNGGNHGAFDIWGQWGQGTLVTVSSGGSSRSSSSGGGGSGGGGEIVLTQSPATLSLSPGERATLSCRASQSVSSSYLAWYQQKPGQAPRLLIYGASSRATGIPARFSGSGSGTDFTLTISRLEPEDFAVYYCRQAMRWPVAFGQGTKVEIK

SEQ ID NO: 4844 - protein, 255 aa, synthetic construct
QVQLVESGGGVVQPGRSLRLSCAASGFTFSSYAMHWVRQAPGKGLEWVAVISYDGSNKYYADSVKGRFTISRDNSKNTLYLQMNSLRAEDTAVYYCARVGWVSAPEALATTPLDYWGQWGQGTLVTVSSGGSSRSSSSGGGGSGGGGEIVLTQSPATLSLSPGERATLSCRASQSVSSSYLAWYQQKPGQAPRLLIYGASSRATGIPARFSGSGSGTDFTLTISRLEPEDFAVYYCMQALQPPITFGQGTKVEIK

SEQ ID NO: 4845 - protein, 252 aa, synthetic construct
QVQLVESGGGVVQPGRSLRLSCAASGFTFSSYAMHWVRQAPGKGLEWVAVISYDGSNKYYADSVKGRFTISRDNSKNTLYLQMNSLRAEDTAVYYCARVGYASAGYQIDHWGQWGQGTLVTVSSGGSSRSSSSGGGGSGGGGEIVLTQSPATLSLSPGERATLSCRASQSVSSSYLAWYQQKPGQAPRLLIYGASSRATGIPARFSGSGSGTDFTLTISRLEPEDFAVYYCGTWDSSASPYVFGQGTKVEIK

SEQ ID NO: 4846 - protein, 251 aa, synthetic construct
QVQLVESGGGVVQPGRSLRLSCAASGFTFSSYAMHWVRQAPGKGLEWVAVISYDGSNKYYADSVKGRFTISRDNSKNTLYLQMNSLRAEDTAVYYCARVLPMKLLRGEFYYWGQWGQGTLVTVSSGGSSRSSSSGGGGSGGGGEIVLTQSPATLSLSPGERATLSCRASQSVSSSYLAWYQQKPGQAPRLLIYGASSRATGIPARFSGSGSGTDFTLTISRLEPEDFAVYYCGTWDSSAGVFGQGTKVEIK

SEQ ID NO: 4847 - protein, 248 aa, synthetic construct
QVQLVESGGGVVQPGRSLRLSCAASGFTFSSYAMHWVRQAPGKGLEWVAVISYDGSNKYYADSVKGRFTISRDNSKNTLYLQMNSLRAEDTAVYYCARVPGRTRYFDSWGQWGQGTLVTVSSGGSSRSSSSGGGGSGGGGEIVLTQSPATLSLSPGERATLSCRASQSVSSSYLAWYQQKPGQAPRLLIYGASSRATGIPARFSGSGSGTDFTLTISRLEPEDFAVYYCQQSNSFPPTFGQGTKVEIK

SEQ ID NO: 4848 - protein, 252 aa, synthetic construct
QVQLVESGGGVVQPGRSLRLSCAASGFTFSSYAMHWVRQAPGKGLEWVAVISYDGSNKYYADSVKGRFTISRDNSKNTLYLQMNSLRAEDTAVYYCARVRSGYSSSQPDYWGQWGQGTLVTVSSGGSSRSSSSGGGGSGGGGEIVLTQSPATLSLSPGERATLSCRASQSVSSSYLAWYQQKPGQAPRLLIYGASSRATGIPARFSGSGSGTDFTLTISRLEPEDFAVYYCVTWDSSLSVYVFGQGTKVEIK

SEQ ID NO: 4849 - protein, 251 aa, synthetic construct
QVQLVESGGGVVQPGRSLRLSCAASGFTFSSYAMHWVRQAPGKGLEWVAVISYDGSNKYYADSVKGRFTISRDNSKNTLYLQMNSLRAEDTAVYYCARVTSRDGYGMGVWGQWGQGTLVTVSSGGSSRSSSSGGGGSGGGGEIVLTQSPATLSLSPGERATLSCRASQSVSSSYLAWYQQKPGQAPRLLIYGASSRATGIPARFSGSGSGTDFTLTISRLEPEDFAVYYCSSYTSSSTLVAFGQGTKVEIK

SEQ ID NO: 4850 - protein, 250 aa, synthetic construct
QVQLVESGGGVVQPGRSLRLSCAASGFTFSSYAMHWVRQAPGKGLEWVAVISYDGSNKYYADSVKGRFTISRDNSKNTLYLQMNSLRAEDTAVYYCARWGDSEVGNAFDIWGQWGQGTLVTVSSGGSSRSSSSGGGGSGGGGEIVLTQSPATLSLSPGERATLSCRASQSVSSSYLAWYQQKPGQAPRLLIYGASSRATGIPARFSGSGSGTDFTLTISRLEPEDFAVYYCQQYNSYPPTFGQGTKVEIK

SEQ ID NO: 4851 - protein, 253 aa, synthetic construct
QVQLVESGGGVVQPGRSLRLSCAASGFTFSSYAMHWVRQAPGKGLEWVAVISYDGSNKYYADSVKGRFTISRDNSKNTLYLQMNSLRAEDTAVYYCARYYDPTGYLTDYWGQWGQGTLVTVSSGGSSRSSSSGGGGSGGGGEIVLTQSPATLSLSPGERATLSCRASQSVSSSYLAWYQQKPGQAPRLLIYGASSRATGIPARFSGSGSGTDFTLTISRLEPEDFAVYYCAAYDDSLLNPGKIFGQGTKVEIK

SEQ ID NO: 4852 - protein, 250 aa, synthetic construct
QVQLVESGGGVVQPGRSLRLSCAASGFTFSSYAMHWVRQAPGKGLEWVAVISYDGSNKYYADSVKGRFTISRDNSKNTLYLQMNSLRAEDTAVYYCARYYDPTGYLTDYWGQWGQGTLVTVSSGGSSRSSSSGGGGSGGGGEIVLTQSPATLSLSPGERATLSCRASQSVSSSYLAWYQQKPGQAPRLLIYGASSRATGIPARFSGSGSGTDFTLTISRLEPEDFAVYYCQAWDRSSLVVFGQGTKVEIK

SEQ ID NO: 4853 - protein, 250 aa, synthetic construct
QVQLVESGGGVVQPGRSLRLSCAASGFTFSSYAMHWVRQAPGKGLEWVAVISYDGSNKYYADSVKGRFTISRDNSKNTLYLQMNSLRAEDTAVYYCARYYDPTGYLTDYWGQWGQGTLVTVSSGGSSRSSSSGGGGSGGGGEIVLTQSPATLSLSPGERATLSCRASQSVSSSYLAWYQQKPGQAPRLLIYGASSRATGIPARFSGSGSGTDFTLTISRLEPEDFAVYYCQAWDSSSSVVFGQGTKVEIK

SEQ ID NO: 4854 - protein, 249 aa, synthetic construct
QVQLVESGGGVVQPGRSLRLSCAASGFTFSSYAMHWVRQAPGKGLEWVAVISYDGSNKYYADSVKGRFTISRDNSKNTLYLQMNSLRAEDTAVYYCARYYDPTGYLTDYWGQWGQGTLVTVSSGGSSRSSSSGGGGSGGGGEIVLTQSPATLSLSPGERATLSCRASQSVSSSYLAWYQQKPGQAPRLLIYGASSRATGIPARFSGSGSGTDFTLTISRLEPEDFAVYYCQQSYSPPPTFGQGTKVEIK

SEQ ID NO: 4855 - protein, 249 aa, synthetic construct
QVQLVESGGGVVQPGRSLRLSCAASGFTFSSYAMHWVRQAPGKGLEWVAVISYDGSNKYYADSVKGRFTISRDNSKNTLYLQMNSLRAEDTAVYYCARYYDPTGYLTDYWGQWGQGTLVTVSSGGSSRSSSSGGGGSGGGGEIVLTQSPATLSLSPGERATLSCRASQSVSSSYLAWYQQKPGQAPRLLIYGASSRATGIPARFSGSGSGTDFTLTISRLEPEDFAVYYCQQYGSSPRTFGQGTKVEIK

SEQ ID NO: 4856 - protein, 250 aa, synthetic construct
QVQLVESGGGVVQPGRSLRLSCAASGFTFSSYAMHWVRQAPGKGLEWVAVISYDGSNKYYADSVKGRFTISRDNSKNTLYLQMNSLRAEDTAVYYCARYYDPTGYLTDYWGQWGQGTLVTVSSGGSSRSSSSGGGGSGGGGEIVLTQSPATLSLSPGERATLSCRASQSVSSSYLAWYQQKPGQAPRLLIYGASSRATGIPARFSGSGSGTDFTLTISRLEPEDFAVYYCQQYYSAPPYTFGQGTKVEIK

SEQ ID NO: 4857 - protein, 253 aa, synthetic construct
QVQLVESGGGVVQPGRSLRLSCAASGFTFSSYAMHWVRQAPGKGLEWVAVISYDGSNKYYADSVKGRFTISRDNSKNTLYLQMNSLRAEDTAVYYCARYYDPTGYLTDYWGQWGQGTLVTVSSGGSSRSSSSGGGGSGGGGEIVLTQSPATLSLSPGERATLSCRASQSVSSSYLAWYQQKPGQAPRLLIYGASSRATGIPARFSGSGSGTDFTLTISRLEPEDFAVYYCQSYDSSLLSGHEVFGQGTKVEIK

SEQ ID NO: 4858 - protein, 249 aa, synthetic construct
QVQLVESGGGVVQPGRSLRLSCAASGFTFSSYAMHWVRQAPGKGLEWVAVISYDGSNKYYADSVKGRFTISRDNSKNTLYLQMNSLRAEDTAVYYCARYYDPTGYLTDYWGQWGQGTLVTVSSGGSSRSSSSGGGGSGGGGEIVLTQSPATLSLSPGERATLSCRASQSVSSSYLAWYQQKPGQAPRLLIYGASSRATGIPARFSGSGSGTDFTLTISRLEPEDFAVYYCQTWDSFGQVFGQGTKVEIK

SEQ ID NO: 4859 - protein, 257 aa, synthetic construct
QVQLVESGGGVVQPGRSLRLSCAASGFTFSSYAMHWVRQAPGKGLEWVAVISYDGSNKYYADSVKGRFTISRDNSKNTLYLQMNSLRAEDTAVYYCASDGGGYRSYGQSMYYMDVWGQWGQGTLVTVSSGGSSRSSSSGGGGSGGGGEIVLTQSPATLSLSPGERATLSCRASQSVSSSYLAWYQQKPGQAPRLLIYGASSRATGIPARFSGSGSGTDFTLTISRLEPEDFAVYYCGAWDSRSNVYVFGQGTKVEIK

SEQ ID NO: 4860 - protein, 254 aa, synthetic construct
QVQLVESGGGVVQPGRSLRLSCAASGFTFSSYAMHWVRQAPGKGLEWVAVISYDGSNKYYADSVKGRFTISRDNSKNTLYLQMNSLRAEDTAVYYCASEGYRTDRKYWLDYWGQWGQGTLVTVSSGGSSRSSSSGGGGSGGGGEIVLTQSPATLSLSPGERATLSCRASQSVSSSYLAWYQQKPGQAPRLLIYGASSRATGIPARFSGSGSGTDFTLTISRLEPEDFAVYYCGTWDSSNLSAGVFGQGTKVEIK

SEQ ID NO: 4861 - protein, 253 aa, synthetic construct
QVQLVESGGGVVQPGRSLRLSCAASGFTFSSYAMHWVRQAPGKGLEWVAVISYDGSNKYYADSVKGRFTISRDNSKNTLYLQMNSLRAEDTAVYYCASEGYRTDRKYWLDYWGQWGQGTLVTVSSGGSSRSSSSGGGGSGGGGEIVLTQSPATLSLSPGERATLSCRASQSVSSSYLAWYQQKPGQAPRLLIYGASSRATGIPARFSGSGSGTDFTLTISRLEPEDFAVYYCQAWDSSSDHTVFGQGTKVEIK

SEQ ID NO: 4862 - protein, 249 aa, synthetic construct
QVQLVESGGGVVQPGRSLRLSCAASGFTFSSYAMHWVRQAPGKGLEWVAVISYDGSNKYYADSVKGRFTISRDNSKNTLYLQMNSLRAEDTAVYYCASLLDYGETGYWGQWGQGTLVTVSSGGSSRSSSSGGGGSGGGGEIVLTQSPATLSLSPGERATLSCRASQSVSSSYLAWYQQKPGQAPRLLIYGASSRATGIPARFSGSGSGTDFTLTISRLEPEDFAVYYCQVWDSRSDHWVFGQGTKVEIK

SEQ ID NO: 4863 - protein, 251 aa, synthetic construct
QVQLVESGGGVVQPGRSLRLSCAASGFTFSSYAMHWVRQAPGKGLEWVAVISYDGSNKYYADSVKGRFTISRDNSKNTLYLQMNSLRAEDTAVYYCASSIAARRYGYGMDVWGQWGQGTLVTVSSGGSSRSSSSGGGGSGGGGEIVLTQSPATLSLSPGERATLSCRASQSVSSSYLAWYQQKPGQAPRLLIYGASSRATGIPARFSGSGSGTDFTLTISRLEPEDFAVYYCQQSDSPPITFGQGTKVEIK

SEQ ID NO: 4864 - protein, 251 aa, synthetic construct
QVQLVESGGGVVQPGRSLRLSCAASGFTFSSYAMHWVRQAPGKGLEWVAVISYDGSNKYYADSVKGRFTISRDNSKNTLYLQMNSLRAEDTAVYYCASTGVNYRRRAFDIWGQWGQGTLVTVSSGGSSRSSSSGGGGSGGGGEIVLTQSPATLSLSPGERATLSCRASQSVSSSYLAWYQQKPGQAPRLLIYGASSRATGIPARFSGSGSGTDFTLTISRLEPEDFAVYYCQSHTSRTQVVFGQGTKVEIK

SEQ ID NO: 4865 - protein, 245 aa, synthetic construct
QVQLVESGGGVVQPGRSLRLSCAASGFTFSSYAMHWVRQAPGKGLEWVAVISYDGSNKYYADSVKGRFTISRDNSKNTLYLQMNSLRAEDTAVYYCASVPRTYWGQWGQGTLVTVSSGGSSRSSSSGGGGSGGGGEIVLTQSPATLSLSPGERATLSCRASQSVSSSYLAWYQQKPGQAPRLLIYGASSRATGIPARFSGSGSGTDFTLTISRLEPEDFAVYYCGTWDDSSGGRVFGQGTKVEIK

SEQ ID NO: 4866 - protein, 250 aa, synthetic construct
QVQLVESGGGVVQPGRSLRLSCAASGFTFSSYAMHWVRQAPGKGLEWVAVISYDGSNKYYADSVKGRFTISRDNSKNTLYLQMNSLRAEDTAVYYCATEQPNGGWPLDSWGQWGQGTLVTVSSGGSSRSSSSGGGGSGGGGEIVLTQSPATLSLSPGERATLSCRASQSVSSSYLAWYQQKPGQAPRLLIYGASSRATGIPARFSGSGSGTDFTLTISRLEPEDFAVYYCSSYTSSSTLVFGQGTKVEIK

SEQ ID NO: 4867 - protein, 251 aa, synthetic construct
QVQLVESGGGVVQPGRSLRLSCAASGFTFSSYAMHWVRQAPGKGLEWVAVISYDGSNKYYADSVKGRFTISRDNSKNTLYLQMNSLRAEDTAVYYCATGGYRDSSGYMDYWGQWGQGTLVTVSSGGSSRSSSSGGGGSGGGGEIVLTQSPATLSLSPGERATLSCRASQSVSSSYLAWYQQKPGQAPRLLIYGASSRATGIPARFSGSGSGTDFTLTISRLEPEDFAVYYCQAWDSSTAEVFGQGTKVEIK

SEQ ID NO: 4868 - protein, 254 aa, synthetic construct
QVQLVESGGGVVQPGRSLRLSCAASGFTFSSYAMHWVRQAPGKGLEWVAVISYDGSNKYYADSVKGRFTISRDNSKNTLYLQMNSLRAEDTAVYYCATGGYRGVLAGVAFDIWGQWGQGTLVTVSSGGSSRSSSSGGGGSGGGGEIVLTQSPATLSLSPGERATLSCRASQSVSSSYLAWYQQKPGQAPRLLIYGASSRATGIPARFSGSGSGTDFTLTISRLEPEDFAVYYCGTGDGSLSGVVFGQGTKVEIK

SEQ ID NO: 4869 - protein, 253 aa, synthetic construct
QVQLVESGGGVVQPGRSLRLSCAASGFTFSSYAMHWVRQAPGKGLEWVAVISYDGSNKYYADSVKGRFTISRDNSKNTLYLQMNSLRAEDTAVYYCATGGYRGVLAGVAFDIWGQWGQGTLVTVSSGGSSRSSSSGGGGSGGGGEIVLTQSPATLSLSPGERATLSCRASQSVSSSYLAWYQQKPGQAPRLLIYGASSRATGIPARFSGSGSGTDFTLTISRLEPEDFAVYYCQAWDSTNTGVFGQGTKVEIK

SEQ ID NO: 4870 - protein, 253 aa, synthetic construct
QVQLVESGGGVVQPGRSLRLSCAASGFTFSSYAMHWVRQAPGKGLEWVAVISYDGSNKYYADSVKGRFTISRDNSKNTLYLQMNSLRAEDTAVYYCATGISVAGKYYYYYMDVWGQWGQGTLVTVSSGGSSRSSSSGGGGSGGGGEIVLTQSPATLSLSPGERATLSCRASQSVSSSYLAWYQQKPGQAPRLLIYGASSRATGIPARFSGSGSGTDFTLTISRLEPEDFAVYYCRQGKHGPWKFGQGTKVEIK

SEQ ID NO: 4871 - protein, 247 aa, synthetic construct
QVQLVESGGGVVQPGRSLRLSCAASGFTFSSYAMHWVRQAPGKGLEWVAVISYDGSNKYYADSVKGRFTISRDNSKNTLYLQMNSLRAEDTAVYYCATGSGWPVHWGQWGQGTLVTVSSGGSSRSSSSGGGGSGGGGEIVLTQSPATLSLSPGERATLSCRASQSVSSSYLAWYQQKPGQAPRLLIYGASSRATGIPARFSGSGSGTDFTLTISRLEPEDFAVYYCQVWDSSSDHVLFGQGTKVEIK

SEQ ID NO: 4872 - protein, 250 aa, synthetic construct
QVQLVESGGGVVQPGRSLRLSCAASGFTFSSYAMHWVRQAPGKGLEWVAVISYDGSNKYYADSVKGRFTISRDNSKNTLYLQMNSLRAEDTAVYYCATGSYRKYAGGFDYWGQWGQGTLVTVSSGGSSRSSSSGGGGSGGGGEIVLTQSPATLSLSPGERATLSCRASQSVSSSYLAWYQQKPGQAPRLLIYGASSRATGIPARFSGSGSGTDFTLTISRLEPEDFAVYYCQQSYSPPPTFGQGTKVEIK

SEQ ID NO: 4873 - protein, 251 aa, synthetic construct
QVQLVESGGGVVQPGRSLRLSCAASGFTFSSYAMHWVRQAPGKGLEWVAVISYDGSNKYYADSVKGRFTISRDNSKNTLYLQMNSLRAEDTAVYYCATGSYRKYAGGFDYWGQWGQGTLVTVSSGGSSRSSSSGGGGSGGGGEIVLTQSPATLSLSPGERATLSCRASQSVSSSYLAWYQQKPGQAPRLLIYGASSRATGIPARFSGSGSGTDFTLTISRLEPEDFAVYYCQQYGSSPSYSFGQGTKVEIK

SEQ ID NO: 4874 - protein, 252 aa, synthetic construct
QVQLVESGGGVVQPGRSLRLSCAASGFTFSSYAMHWVRQAPGKGLEWVAVISYDGSNKYYADSVKGRFTISRDNSKNTLYLQMNSLRAEDTAVYYCATGSYRKYAGGFDYWGQWGQGTLVTVSSGGSSRSSSSGGGGSGGGGEIVLTQSPATLSLSPGERATLSCRASQSVSSSYLAWYQQKPGQAPRLLIYGASSRATGIPARFSGSGSGTDFTLTISRLEPEDFAVYYCQQYGSSSPTFTFGQGTKVEIK

SEQ ID NO: 4875 - protein, 250 aa, synthetic construct
QVQLVESGGGVVQPGRSLRLSCAASGFTFSSYAMHWVRQAPGKGLEWVAVISYDGSNKYYADSVKGRFTISRDNSKNTLYLQMNSLRAEDTAVYYCATGSYRKYAGGFDYWGQWGQGTLVTVSSGGSSRSSSSGGGGSGGGGEIVLTQSPATLSLSPGERATLSCRASQSVSSSYLAWYQQKPGQAPRLLIYGASSRATGIPARFSGSGSGTDFTLTISRLEPEDFAVYYCQQYGTSPNTFGQGTKVEIK

SEQ ID NO: 4876 - protein, 250 aa, synthetic construct
QVQLVESGGGVVQPGRSLRLSCAASGFTFSSYAMHWVRQAPGKGLEWVAVISYDGSNKYYADSVKGRFTISRDNSKNTLYLQMNSLRAEDTAVYYCATGSYRKYAGGFDYWGQWGQGTLVTVSSGGSSRSSSSGGGGSGGGGEIVLTQSPATLSLSPGERATLSCRASQSVSSSYLAWYQQKPGQAPRLLIYGASSRATGIPARFSGSGSGTDFTLTISRLEPEDFAVYYCQQYNNPSWTFGQGTKVEIK

SEQ ID NO: 4877 - protein, 252 aa, synthetic construct
QVQLVESGGGVVQPGRSLRLSCAASGFTFSSYAMHWVRQAPGKGLEWVAVISYDGSNKYYADSVKGRFTISRDNSKNTLYLQMNSLRAEDTAVYYCATGSYRKYAGGFDYWGQWGQGTLVTVSSGGSSRSSSSGGGGSGGGGEIVLTQSPATLSLSPGERATLSCRASQSVSSSYLAWYQQKPGQAPRLLIYGASSRATGIPARFSGSGSGTDFTLTISRLEPEDFAVYYCQVWDDSTGNYVFGQGTKVEIK

SEQ ID NO: 4878 - protein, 252 aa, synthetic construct
QVQLVESGGGVVQPGRSLRLSCAASGFTFSSYAMHWVRQAPGKGLEWVAVISYDGSNKYYADSVKGRFTISRDNSKNTLYLQMNSLRAEDTAVYYCATPQVSGLNFDYWGQWGQGTLVTVSSGGSSRSSSSGGGGSGGGGEIVLTQSPATLSLSPGERATLSCRASQSVSSSYLAWYQQKPGQAPRLLIYGASSRATGIPARFSGSGSGTDFTLTISRLEPEDFAVYYCQSYDSSLSGPHVVFGQGTKVEIK

SEQ ID NO: 4879 - protein, 249 aa, synthetic construct
QVQLVESGGGVVQPGRSLRLSCAASGFTFSSYAMHWVRQAPGKGLEWVAVISYDGSNKYYADSVKGRFTISRDNSKNTLYLQMNSLRAEDTAVYYCATPQVSGLNFDYWGQWGQGTLVTVSSGGSSRSSSSGGGGSGGGGEIVLTQSPATLSLSPGERATLSCRASQSVSSSYLAWYQQKPGQAPRLLIYGASSRATGIPARFSGSGSGTDFTLTISRLEPEDFAVYYCQSYGGSSPVVFGQGTKVEIK

SEQ ID NO: 4880 - protein, 245 aa, synthetic construct
QVQLVESGGGVVQPGRSLRLSCAASGFTFSSYAMHWVRQAPGKGLEWVAVISYDGSNKYYADSVKGRFTISRDNSKNTLYLQMNSLRAEDTAVYYCLDNESDFWGQWGQGTLVTVSSGGSSRSSSSGGGGSGGGGEIVLTQSPATLSLSPGERATLSCRASQSVSSSYLAWYQQKPGQAPRLLIYGASSRATGIPARFSGSGSGTDFTLTISRLEPEDFAVYYCGSWDSGLQDFVFGQGTKVEIK

SEQ ID NO: 4881 - protein, 249 aa, synthetic construct
QVQLVESGGGVVQPGRSLRLSCAASGFTFSSYAMHWVRQAPGKGLEWVAVISYDGSNKYYADSVKGRFTISRDNSKNTLYLQMNSLRAEDTAVYYCMRHYSSGPRAVDSWGQWGQGTLVTVSSGGSSRSSSSGGGGSGGGGEIVLTQSPATLSLSPGERATLSCRASQSVSSSYLAWYQQKPGQAPRLLIYGASSRATGIPARFSGSGSGTDFTLTISRLEPEDFAVYYCQQSYSPPITFGQGTKVEIK

SEQ ID NO: 4882 - protein, 246 aa, synthetic construct
QVQLVESGGGVVQPGRSLRLSCAASGFTFSSYAMHWVRQAPGKGLEWVAVISYDGSNKYYADSVKGRFTISRDNSKNTLYLQMNSLRAEDTAVYYCRTDKRMDYWGQWGQGTLVTVSSGGSSRSSSSGGGGSGGGGEIVLTQSPATLSLSPGERATLSCRASQSVSSSYLAWYQQKPGQAPRLLIYGASSRATGIPARFSGSGSGTDFTLTISRLEPEDFAVYYCQAWDSSTSSWVFGQGTKVEIK

SEQ ID NO: 4883 - protein, 248 aa, synthetic construct
QVQLVESGGGVVQPGRSLRLSCAASGFTFSSYAMHWVRQAPGKGLEWVAVISYDGSNKYYADSVKGRFTISRDNSKNTLYLQMNSLRAEDTAVYYCSKGHSTMQYFDYWGQWGQGTLVTVSSGGSSRSSSSGGGGSGGGGEIVLTQSPATLSLSPGERATLSCRASQSVSSSYLAWYQQKPGQAPRLLIYGASSRATGIPARFSGSGSGTDFTLTISRLEPEDFAVYYCMQAGQWPRTFGQGTKVEIK

SEQ ID NO: 4884 - protein, 247 aa, synthetic construct
QVQLVESGGGVVQPGRSLRLSCAASGFTFSSYAMHWVRQAPGKGLEWVAVISYDGSNKYYADSVKGRFTISRDNSKNTLYLQMNSLRAEDTAVYYCSRDRPVYSDVWGQWGQGTLVTVSSGGSSRSSSSGGGGSGGGGEIVLTQSPATLSLSPGERATLSCRASQSVSSSYLAWYQQKPGQAPRLLIYGASSRATGIPARFSGSGSGTDFTLTISRLEPEDFAVYYCQVWDSSGDVVFGQGTKVEIK

SEQ ID NO: 4885 - protein, 246 aa, synthetic construct
QVQLVESGGGVVQPGRSLRLSCAASGFTFSSYAMHWVRQAPGKGLEWVAVISYDGSNKYYADSVKGRFTISRDNSKNTLYLQMNSLRAEDTAVYYCSTGRARVVDWGQWGQGTLVTVSSGGSSRSSSSGGGGSGGGGEIVLTQSPATLSLSPGERATLSCRASQSVSSSYLAWYQQKPGQAPRLLIYGASSRATGIPARFSGSGSGTDFTLTISRLEPEDFAVYYCQAWDSSAHVVFGQGTKVEIK

SEQ ID NO: 4886 - protein, 247 aa, synthetic construct
QVQLVESGGGVVQPGRSLRLSCAASGFTFSSYAMHWVRQAPGKGLEWVAVISYDGSNKYYADSVKGRFTISRDNSKNTLYLQMNSLRAEDTAVYYCTRGLGWKIEPWGQWGQGTLVTVSSGGSSRSSSSGGGGSGGGGEIVLTQSPATLSLSPGERATLSCRASQSVSSSYLAWYQQKPGQAPRLLIYGASSRATGIPARFSGSGSGTDFTLTISRLEPEDFAVYYCQAWDSSPSVVFGQGTKVEIK

SEQ ID NO: 4887 - protein, 247 aa, synthetic construct
QVQLVESGGGVVQPGRSLRLSCAASGFTFSSYAMHWVRQAPGKGLEWVAVISYDGSNKYYADSVKGRFTISRDNSKNTLYLQMNSLRAEDTAVYYCTRGLGWKIEPWGQWGQGTLVTVSSGGSSRSSSSGGGGSGGGGEIVLTQSPATLSLSPGERATLSCRASQSVSSSYLAWYQQKPGQAPRLLIYGASSRATGIPARFSGSGSGTDFTLTISRLEPEDFAVYYCQAWDSTPAVVFGQGTKVEIK

SEQ ID NO: 4888 - protein, 247 aa, synthetic construct
QVQLVESGGGVVQPGRSLRLSCAASGFTFSSYAMHWVRQAPGKGLEWVAVISYDGSNKYYADSVKGRFTISRDNSKNTLYLQMNSLRAEDTAVYYCTRGLGWKIEPWGQWGQGTLVTVSSGGSSRSSSSGGGGSGGGGEIVLTQSPATLSLSPGERATLSCRASQSVSSSYLAWYQQKPGQAPRLLIYGASSRATGIPARFSGSGSGTDFTLTISRLEPEDFAVYYCQTWGTGIQVVFGQGTKVEIK

SEQ ID NO: 4889 - protein, 261 aa, synthetic construct
QVQLVESGGGVVQPGRSLRLSCAASGFTFSSYAMHWVRQAPGKGLEWVAVISYDGSNKYYADSVKGRFTISRDNSKNTLYLQMNSLRAEDTAVYYCTRHVSWYGDSAIYYYYYGQPYGMDYWGQWGQGTLVTVSSGGSSRSSSSGGGGSGGGGEIVLTQSPATLSLSPGERATLSCRASQSVSSSYLAWYQQKPGQAPRLLIYGASSRATGIPARFSGSGSGTDFTLTISRLEPEDFAVYYCQAWDTSHVVFGQGTKVEIK

SEQ ID NO: 4890 - protein, 255 aa, synthetic construct
QVQLVESGGGVVQPGRSLRLSCAASGFTFSSYAMHWVRQAPGKGLEWVAVISYDGSNKYYADSVKGRFTISRDNSKNTLYLQMNSLRAEDTAVYYCTTARYRGSSWPSNMHYWGQWGQGTLVTVSSGGSSRSSSSGGGGSGGGGEIVLTQSPATLSLSPGERATLSCRASQSVSSSYLAWYQQKPGQAPRLLIYGASSRATGIPARFSGSGSGTDFTLTISRLEPEDFAVYYCGTWDSSSLTSGVFGQGTKVEIK

SEQ ID NO: 4891 - protein, 246 aa, synthetic construct
QVQLVESGGGVVQPGRSLRLSCAASGFTFSSYAMHWVRQAPGKGLEWVAVISYDGSNKYYADSVKGRFTISRDNSKNTLYLQMNSLRAEDTAVYYCTTGAFDYWGQWGQGTLVTVSSGGSSRSSSSGGGGSGGGGEIVLTQSPATLSLSPGERATLSCRASQSVSSSYLAWYQQKPGQAPRLLIYGASSRATGIPARFSGSGSGTDFTLTISRLEPEDFAVYYCQVWDSSSDHLVVFGQGTKVEIK

SEQ ID NO: 4892 - protein, 246 aa, synthetic construct
QVQLVESGGGVVQPGRSLRLSCAASGFTFSSYAMHWVRQAPGKGLEWVAVISYDGSNKYYADSVKGRFTISRDNSKNTLYLQMNSLRAEDTAVYYCVGDHGFVHHWGQWGQGTLVTVSSGGSSRSSSSGGGGSGGGGEIVLTQSPATLSLSPGERATLSCRASQSVSSSYLAWYQQKPGQAPRLLIYGASSRATGIPARFSGSGSGTDFTLTISRLEPEDFAVYYCSSYTSSSSEVFGQGTKVEIK

SEQ ID NO: 4893 - protein, 247 aa, synthetic construct
QVQLVESGGGVVQPGRSLRLSCAASGFTFSSYAMHWVRQAPGKGLEWVAVISYDGSNKYYADSVKGRFTISRDNSKNTLYLQMNSLRAEDTAVYYCVKDQRQTWSFDYWGQWGQGTLVTVSSGGSSRSSSSGGGGSGGGGEIVLTQSPATLSLSPGERATLSCRASQSVSSSYLAWYQQKPGQAPRLLIYGASSRATGIPARFSGSGSGTDFTLTISRLEPEDFAVYYCGQYYSSQTFGQGTKVEIK

SEQ ID NO: 4894 - protein, 254 aa, synthetic construct
QVQLVESGGGVVQPGRSLRLSCAASGFTFSSYAMHWVRQAPGKGLEWVAVISYDGSNKYYADSVKGRFTISRDNSKNTLYLQMNSLRAEDTAVYYCVKKHRPPVNGASYLGSWGQWGQGTLVTVSSGGSSRSSSSGGGGSGGGGEIVLTQSPATLSLSPGERATLSCRASQSVSSSYLAWYQQKPGQAPRLLIYGASSRATGIPARFSGSGSGTDFTLTISRLEPEDFAVYYCQVWDSSSDHWVFGQGTKVEIK

SEQ ID NO: 4895 - protein, 247 aa, synthetic construct
QVQLVESGGGVVQPGRSLRLSCAASGFTFSSYAMHWVRQAPGKGLEWVAVISYDGSNKYYADSVKGRFTISRDNSKNTLYLQMNSLRAEDTAVYYCVNNNTGWAFDIWGQWGQGTLVTVSSGGSSRSSSSGGGGSGGGGEIVLTQSPATLSLSPGERATLSCRASQSVSSSYLAWYQQKPGQAPRLLIYGASSRATGIPARFSGSGSGTDFTLTISRLEPEDFAVYYCQQSNSPPITFGQGTKVEIK

SEQ ID NO: 4896 - protein, 250 aa, synthetic construct
QVQLVESGGGVVQPGRSLRLSCAASGFTFSSYAMHWVRQAPGKGLEWVAVISYDGSNKYYADSVKGRFTISRDNSKNTLYLQMNSLRAEDTAVYYCVRAFSYSWPFDHWGQWGQGTLVTVSSGGSSRSSSSGGGGSGGGGEIVLTQSPATLSLSPGERATLSCRASQSVSSSYLAWYQQKPGQAPRLLIYGASSRATGIPARFSGSGSGTDFTLTISRLEPEDFAVYYCQQYGSSSPMYTFGQGTKVEIK

SEQ ID NO: 4897 - protein, 248 aa, synthetic construct
QVQLVESGGGVVQPGRSLRLSCAASGFTFSSYAMHWVRQAPGKGLEWVAVISYDGSNKYYADSVKGRFTISRDNSKNTLYLQMNSLRAEDTAVYYCVRAFSYSWPFDHWGQWGQGTLVTVSSGGSSRSSSSGGGGSGGGGEIVLTQSPATLSLSPGERATLSCRASQSVSSSYLAWYQQKPGQAPRLLIYGASSRATGIPARFSGSGSGTDFTLTISRLEPEDFAVYYCQQYNSYPWTFGQGTKVEIK

SEQ ID NO: 4898 - protein, 248 aa, synthetic construct
QVQLVESGGGVVQPGRSLRLSCAASGFTFSSYAMHWVRQAPGKGLEWVAVISYDGSNKYYADSVKGRFTISRDNSKNTLYLQMNSLRAEDTAVYYCVRAFSYSWPFDHWGQWGQGTLVTVSSGGSSRSSSSGGGGSGGGGEIVLTQSPATLSLSPGERATLSCRASQSVSSSYLAWYQQKPGQAPRLLIYGASSRATGIPARFSGSGSGTDFTLTISRLEPEDFAVYYCQQYNTYPWTFGQGTKVEIK

SEQ ID NO: 4899 - protein, 248 aa, synthetic construct
QVQLVESGGGVVQPGRSLRLSCAASGFTFSSYAMHWVRQAPGKGLEWVAVISYDGSNKYYADSVKGRFTISRDNSKNTLYLQMNSLRAEDTAVYYCVRAFSYSWPFDHWGQWGQGTLVTVSSGGSSRSSSSGGGGSGGGGEIVLTQSPATLSLSPGERATLSCRASQSVSSSYLAWYQQKPGQAPRLLIYGASSRATGIPARFSGSGSGTDFTLTISRLEPEDFAVYYCQQYYNYPWTFGQGTKVEIK

SEQ ID NO: 4900 - protein, 249 aa, synthetic construct
QVQLVESGGGVVQPGRSLRLSCAASGFTFSSYAMHWVRQAPGKGLEWVAVISYDGSNKYYADSVKGRFTISRDNSKNTLYLQMNSLRAEDTAVYYCVRAFSYSWPFDHWGQWGQGTLVTVSSGGSSRSSSSGGGGSGGGGEIVLTQSPATLSLSPGERATLSCRASQSVSSSYLAWYQQKPGQAPRLLIYGASSRATGIPARFSGSGSGTDFTLTISRLEPEDFAVYYCQQYYSSPPVSFGQGTKVEIK

SEQ ID NO: 4901 - protein, 249 aa, synthetic construct
QVQLVESGGGVVQPGRSLRLSCAASGFTFSSYAMHWVRQAPGKGLEWVAVISYDGSNKYYADSVKGRFTISRDNSKNTLYLQMNSLRAEDTAVYYCVRAFSYSWPFDHWGQWGQGTLVTVSSGGSSRSSSSGGGGSGGGGEIVLTQSPATLSLSPGERATLSCRASQSVSSSYLAWYQQKPGQAPRLLIYGASSRATGIPARFSGSGSGTDFTLTISRLEPEDFAVYYCQSPDSSGNWVFGQGTKVEIK

SEQ ID NO: 4902 - protein, 257 aa, synthetic construct
QVQLVESGGGVVQPGRSLRLSCAASGFTFSSYAMHWVRQAPGKGLEWVAVISYDGSNKYYADSVKGRFTISRDNSKNTLYLQMNSLRAEDTAVYYCVRDRNYYRSYWKGDVFDIWGQWGQGTLVTVSSGGSSRSSSSGGGGSGGGGEIVLTQSPATLSLSPGERATLSCRASQSVSSSYLAWYQQKPGQAPRLLIYGASSRATGIPARFSGSGSGTDFTLTISRLEPEDFAVYYCNSSDSYGGNTVVFGQGTKVEIK

SEQ ID NO: 4903 - protein, 253 aa, synthetic construct
QVQLVESGGGVVQPGRSLRLSCAASGFTFSSYAMHWVRQAPGKGLEWVAVISYDGSNKYYADSVKGRFTISRDNSKNTLYLQMNSLRAEDTAVYYCVRDSGGYRDQPGYYLDYWGQWGQGTLVTVSSGGSSRSSSSGGGGSGGGGEIVLTQSPATLSLSPGERATLSCRASQSVSSSYLAWYQQKPGQAPRLLIYGASSRATGIPARFSGSGSGTDFTLTISRLEPEDFAVYYCQQYDFTPPTFGQGTKVEIK

SEQ ID NO: 4904 - protein, 248 aa, synthetic construct
QVQLVESGGGVVQPGRSLRLSCAASGFTFSSYAMHWVRQAPGKGLEWVAVISYDGSNKYYADSVKGRFTISRDNSKNTLYLQMNSLRAEDTAVYYCVRDYDYSQVGHWGQWGQGTLVTVSSGGSSRSSSSGGGGSGGGGEIVLTQSPATLSLSPGERATLSCRASQSVSSSYLAWYQQKPGQAPRLLIYGASSRATGIPARFSGSGSGTDFTLTISRLEPEDFAVYYCQAWDSTTDRVFGQGTKVEIK

SEQ ID NO: 4905 - protein, 250 aa, synthetic construct
QVQLVESGGGVVQPGRSLRLSCAASGFTFSSYAMHWVRQAPGKGLEWVAVISYDGSNKYYADSVKGRFTISRDNSKNTLYLQMNSLRAEDTAVYYCVREGFSGTWTAFDIWGQWGQGTLVTVSSGGSSRSSSSGGGGSGGGGEIVLTQSPATLSLSPGERATLSCRASQSVSSSYLAWYQQKPGQAPRLLIYGASSRATGIPARFSGSGSGTDFTLTISRLEPEDFAVYYCQQEDSPPITFGQGTKVEIK

SEQ ID NO: 4906 - protein, 256 aa, synthetic construct
QVQLVESGGGVVQPGRSLRLSCAASGFTFSSYAMHWVRQAPGKGLEWVAVISYDGSNKYYADSVKGRFTISRDNSKNTLYLQMNSLRAEDTAVYYCVRHAFFYGYYQDDAFDVWGQWGQGTLVTVSSGGSSRSSSSGGGGSGGGGEIVLTQSPATLSLSPGERATLSCRASQSVSSSYLAWYQQKPGQAPRLLIYGASSRATGIPARFSGSGSGTDFTLTISRLEPEDFAVYYCGTWDSSRLPAYVFGQGTKVEIK

SEQ ID NO: 4907 - protein, 250 aa, synthetic construct
QVQLVESGGGVVQPGRSLRLSCAASGFTFSSYAMHWVRQAPGKGLEWVAVISYDGSNKYYADSVKGRFTISRDNSKNTLYLQMNSLRAEDTAVYYCVRILFGFKGMDVWGQWGQGTLVTVSSGGSSRSSSSGGGGSGGGGEIVLTQSPATLSLSPGERATLSCRASQSVSSSYLAWYQQKPGQAPRLLIYGASSRATGIPARFSGSGSGTDFTLTISRLEPEDFAVYYCQVWDRSTDLVVFGQGTKVEIK

SEQ ID NO: 4908 - protein, 250 aa, synthetic construct
QVQLVESGGGVVQPGRSLRLSCAASGFTFSSYAMHWVRQAPGKGLEWVAVISYDGSNKYYADSVKGRFTISRDNSKNTLYLQMNSLRAEDTAVYYCVRKGRSVRGADYWGQWGQGTLVTVSSGGSSRSSSSGGGGSGGGGEIVLTQSPATLSLSPGERATLSCRASQSVSSSYLAWYQQKPGQAPRLLIYGASSRATGIPARFSGSGSGTDFTLTISRLEPEDFAVYYCQVWDSSSDHWVFGQGTKVEIK

SEQ ID NO: 4909 - protein, 250 aa, synthetic construct
QVQLVESGGGVVQPGRSLRLSCAASGFTFSSYAMHWVRQAPGKGLEWVAVISYDGSNKYYADSVKGRFTISRDNSKNTLYLQMNSLRAEDTAVYYCVRLGTAVNTSLFDIWGQWGQGTLVTVSSGGSSRSSSSGGGGSGGGGEIVLTQSPATLSLSPGERATLSCRASQSVSSSYLAWYQQKPGQAPRLLIYGASSRATGIPARFSGSGSGTDFTLTISRLEPEDFAVYYCQQNDTSPRTFGQGTKVEIK

SEQ ID NO: 4910 - protein, 249 aa, synthetic construct
QVQLVESGGGVVQPGRSLRLSCAASGFTFSSYAMHWVRQAPGKGLEWVAVISYDGSNKYYADSVKGRFTISRDNSKNTLYLQMNSLRAEDTAVYYCVRMQRYGMDVWGQWGQGTLVTVSSGGSSRSSSSGGGGSGGGGEIVLTQSPATLSLSPGERATLSCRASQSVSSSYLAWYQQKPGQAPRLLIYGASSRATGIPARFSGSGSGTDFTLTISRLEPEDFAVYYCGTWDSSSSHLKVFGQGTKVEIK

SEQ ID NO: 4911 - protein, 249 aa, synthetic construct
QVQLVESGGGVVQPGRSLRLSCAASGFTFSSYAMHWVRQAPGKGLEWVAVISYDGSNKYYADSVKGRFTISRDNSKNTLYLQMNSLRAEDTAVYYCVRNRGWQQFDYWGQWGQGTLVTVSSGGSSRSSSSGGGGSGGGGEIVLTQSPATLSLSPGERATLSCRASQSVSSSYLAWYQQKPGQAPRLLIYGASSRATGIPARFSGSGSGTDFTLTISRLEPEDFAVYYCQSLDSGLKSWVFGQGTKVEIK

SEQ ID NO: 4912 - protein, 251 aa, synthetic construct
QVQLVESGGGVVQPGRSLRLSCAASGFTFSSYAMHWVRQAPGKGLEWVAVISYDGSNKYYADSVKGRFTISRDNSKNTLYLQMNSLRAEDTAVYYCVRPLSWGAYYRALDDWGQWGQGTLVTVSSGGSSRSSSSGGGGSGGGGEIVLTQSPATLSLSPGERATLSCRASQSVSSSYLAWYQQKPGQAPRLLIYGASSRATGIPARFSGSGSGTDFTLTISRLEPEDFAVYYCQQYYSPLPTFGQGTKVEIK

SEQ ID NO: 4913 - protein, 255 aa, synthetic construct
QVQLVESGGGVVQPGRSLRLSCAASGFTFSSYAMHWVRQAPGKGLEWVAVISYDGSNKYYADSVKGRFTISRDNSKNTLYLQMNSLRAEDTAVYYCVRRPRWFDSAYYAPFENWGQWGQGTLVTVSSGGSSRSSSSGGGGSGGGGEIVLTQSPATLSLSPGERATLSCRASQSVSSSYLAWYQQKPGQAPRLLIYGASSRATGIPARFSGSGSGTDFTLTISRLEPEDFAVYYCETWDSRRNAVVFGQGTKVEIK

SEQ ID NO: 4914 - protein, 253 aa, synthetic construct
QVQLVESGGGVVQPGRSLRLSCAASGFTFSSYAMHWVRQAPGKGLEWVAVISYDGSNKYYADSVKGRFTISRDNSKNTLYLQMNSLRAEDTAVYYCVRRPRWFDSAYYAPFENWGQWGQGTLVTVSSGGSSRSSSSGGGGSGGGGEIVLTQSPATLSLSPGERATLSCRASQSVSSSYLAWYQQKPGQAPRLLIYGASSRATGIPARFSGSGSGTDFTLTISRLEPEDFAVYYCQQRSKWPLIFGQGTKVEIK

SEQ ID NO: 4915 - protein, 248 aa, synthetic construct
QVQLVESGGGVVQPGRSLRLSCAASGFTFSSYAMHWVRQAPGKGLEWVAVISYDGSNKYYADSVKGRFTISRDNSKNTLYLQMNSLRAEDTAVYYCVTDSYTATAPDHWGQWGQGTLVTVSSGGSSRSSSSGGGGSGGGGEIVLTQSPATLSLSPGERATLSCRASQSVSSSYLAWYQQKPGQAPRLLIYGASSRATGIPARFSGSGSGTDFTLTISRLEPEDFAVYYCQQDYSPPPTFGQGTKVEIK

SEQ ID NO: 4916 - protein, 252 aa, synthetic construct
QVQLVESGGGVVQPGRSLRLSCAASGFTFSSYAMHWVRQAPGKGLEWVAVISYDGSNKYYADSVKGRFTISRDNSKNTLYLQMNSLRAEDTAVYYCAAAKNGASLGVNLWGQWGQGTLVTVSSGGSSRSSSSGGGGSGGGGEIVLTQSPATLSLSPGERATLSCRASQSVSSSYLAWYQQKPGQAPRLLIYGASSRATGIPARFSGSGSGTDFTLTISRLEPEDFAVYYCGTWDSSSPSGYVFGQGTKVEIK

SEQ ID NO: 4917 - protein, 251 aa, synthetic construct
QVQLVESGGGVVQPGRSLRLSCAASGFTFSSYAMHWVRQAPGKGLEWVAVISYDGSNKYYADSVKGRFTISRDNSKNTLYLQMNSLRAEDTAVYYCAAAKNGASLGVNLWGQWGQGTLVTVSSGGSSRSSSSGGGGSGGGGEIVLTQSPATLSLSPGERATLSCRASQSVSSSYLAWYQQKPGQAPRLLIYGASSRATGIPARFSGSGSGTDFTLTISRLEPEDFAVYYCQSYDRSRRGVVFGQGTKVEIK

SEQ ID NO: 4918 - protein, 249 aa, synthetic construct
QVQLVESGGGVVQPGRSLRLSCAASGFTFSSYAMHWVRQAPGKGLEWVAVISYDGSNKYYADSVKGRFTISRDNSKNTLYLQMNSLRAEDTAVYYCAAAKNGASLGVNLWGQWGQGTLVTVSSGGSSRSSSSGGGGSGGGGEIVLTQSPATLSLSPGERATLSCRASQSVSSSYLAWYQQKPGQAPRLLIYGASSRATGIPARFSGSGSGTDFTLTISRLEPEDFAVYYCQTWDTSTVVFGQGTKVEIK

SEQ ID NO: 4919 - protein, 250 aa, synthetic construct
QVQLVESGGGVVQPGRSLRLSCAASGFTFSSYAMHWVRQAPGKGLEWVAVISYDGSNKYYADSVKGRFTISRDNSKNTLYLQMNSLRAEDTAVYYCAAAKNGASLGVNLWGQWGQGTLVTVSSGGSSRSSSSGGGGSGGGGEIVLTQSPATLSLSPGERATLSCRASQSVSSSYLAWYQQKPGQAPRLLIYGASSRATGIPARFSGSGSGTDFTLTISRLEPEDFAVYYCQTWGPGIHVVFGQGTKVEIK

SEQ ID NO: 4920 - protein, 245 aa, synthetic construct
QVQLVESGGGVVQPGRSLRLSCAASGFTFSSYAMHWVRQAPGKGLEWVAVISYDGSNKYYADSVKGRFTISRDNSKNTLYLQMNSLRAEDTAVYYCADLQYDYWGQWGQGTLVTVSSGGSSRSSSSGGGGSGGGGEIVLTQSPATLSLSPGERATLSCRASQSVSSSYLAWYQQKPGQAPRLLIYGASSRATGIPARFSGSGSGTDFTLTISRLEPEDFAVYYCAAWDDSNNDPVFGQGTKVEIK

SEQ ID NO: 4921 - protein, 243 aa, synthetic construct
QVQLVESGGGVVQPGRSLRLSCAASGFTFSSYAMHWVRQAPGKGLEWVAVISYDGSNKYYADSVKGRFTISRDNSKNTLYLQMNSLRAEDTAVYYCADLQYDYWGQWGQGTLVTVSSGGSSRSSSSGGGGSGGGGEIVLTQSPATLSLSPGERATLSCRASQSVSSSYLAWYQQKPGQAPRLLIYGASSRATGIPARFSGSGSGTDFTLTISRLEPEDFAVYYCHQYDSSPETFGQGTKVEIK

SEQ ID NO: 4922 - protein, 243 aa, synthetic construct
QVQLVESGGGVVQPGRSLRLSCAASGFTFSSYAMHWVRQAPGKGLEWVAVISYDGSNKYYADSVKGRFTISRDNSKNTLYLQMNSLRAEDTAVYYCADLQYDYWGQWGQGTLVTVSSGGSSRSSSSGGGGSGGGGEIVLTQSPATLSLSPGERATLSCRASQSVSSSYLAWYQQKPGQAPRLLIYGASSRATGIPARFSGSGSGTDFTLTISRLEPEDFAVYYCQQYGTAPIAFGQGTKVEIK

SEQ ID NO: 4923 - protein, 244 aa, synthetic construct
QVQLVESGGGVVQPGRSLRLSCAASGFTFSSYAMHWVRQAPGKGLEWVAVISYDGSNKYYADSVKGRFTISRDNSKNTLYLQMNSLRAEDTAVYYCADLQYDYWGQWGQGTLVTVSSGGSSRSSSSGGGGSGGGGEIVLTQSPATLSLSPGERATLSCRASQSVSSSYLAWYQQKPGQAPRLLIYGASSRATGIPARFSGSGSGTDFTLTISRLEPEDFAVYYCYSWDSTDTVVFGQGTKVEIK

SEQ ID NO: 4924 - protein, 249 aa, synthetic construct
QVQLVESGGGVVQPGRSLRLSCAASGFTFSSYAMHWVRQAPGKGLEWVAVISYDGSNKYYADSVKGRFTISRDNSKNTLYLQMNSLRAEDTAVYYCADTAYSLPGDIWGQWGQGTLVTVSSGGSSRSSSSGGGGSGGGGEIVLTQSPATLSLSPGERATLSCRASQSVSSSYLAWYQQKPGQAPRLLIYGASSRATGIPARFSGSGSGTDFTLTISRLEPEDFAVYYCQVWDSSSDHWVFGQGTKVEIK

SEQ ID NO: 4925 - protein, 249 aa, synthetic construct
QVQLVESGGGVVQPGRSLRLSCAASGFTFSSYAMHWVRQAPGKGLEWVAVISYDGSNKYYADSVKGRFTISRDNSKNTLYLQMNSLRAEDTAVYYCADTAYSLPGDYWGQWGQGTLVTVSSGGSSRSSSSGGGGSGGGGEIVLTQSPATLSLSPGERATLSCRASQSVSSSYLAWYQQKPGQAPRLLIYGASSRATGIPARFSGSGSGTDFTLTISRLEPEDFAVYYCQVWDNNSDLWVFGQGTKVEIK

SEQ ID NO: 4926 - protein, 245 aa, synthetic construct
QVQLVESGGGVVQPGRSLRLSCAASGFTFSSYAMHWVRQAPGKGLEWVAVISYDGSNKYYADSVKGRFTISRDNSKNTLYLQMNSLRAEDTAVYYCAGVGRIFPYWGQWGQGTLVTVSSGGSSRSSSSGGGGSGGGGEIVLTQSPATLSLSPGERATLSCRASQSVSSSYLAWYQQKPGQAPRLLIYGASSRATGIPARFSGSGSGTDFTLTISRLEPEDFAVYYCQQSYSTPLTFGQGTKVEIK

SEQ ID NO: 4927 - protein, 248 aa, synthetic construct
QVQLVESGGGVVQPGRSLRLSCAASGFTFSSYAMHWVRQAPGKGLEWVAVISYDGSNKYYADSVKGRFTISRDNSKNTLYLQMNSLRAEDTAVYYCAKAGAVWLDYWGQWGQGTLVTVSSGGSSRSSSSGGGGSGGGGEIVLTQSPATLSLSPGERATLSCRASQSVSSSYLAWYQQKPGQAPRLLIYGASSRATGIPARFSGSGSGTDFTLTISRLEPEDFAVYYCGTWDGGRGTGVFGQGTKVEIK

SEQ ID NO: 4928 - protein, 249 aa, synthetic construct
QVQLVESGGGVVQPGRSLRLSCAASGFTFSSYAMHWVRQAPGKGLEWVAVISYDGSNKYYADSVKGRFTISRDNSKNTLYLQMNSLRAEDTAVYYCAKDGGGVYTLDYWGQWGQGTLVTVSSGGSSRSSSSGGGGSGGGGEIVLTQSPATLSLSPGERATLSCRASQSVSSSYLAWYQQKPGQAPRLLIYGASSRATGIPARFSGSGSGTDFTLTISRLEPEDFAVYYCQAWDSSSKVVFGQGTKVEIK

SEQ ID NO: 4929 - protein, 251 aa, synthetic construct
QVQLVESGGGVVQPGRSLRLSCAASGFTFSSYAMHWVRQAPGKGLEWVAVISYDGSNKYYADSVKGRFTISRDNSKNTLYLQMNSLRAEDTAVYYCAKDGGGVYTLDYWGQWGQGTLVTVSSGGSSRSSSSGGGGSGGGGEIVLTQSPATLSLSPGERATLSCRASQSVSSSYLAWYQQKPGQAPRLLIYGASSRATGIPARFSGSGSGTDFTLTISRLEPEDFAVYYCQAWDSSTTPFWVFGQGTKVEIK

SEQ ID NO: 4930 - protein, 248 aa, synthetic construct
QVQLVESGGGVVQPGRSLRLSCAASGFTFSSYAMHWVRQAPGKGLEWVAVISYDGSNKYYADSVKGRFTISRDNSKNTLYLQMNSLRAEDTAVYYCAKDGGGVYTLDYWGQWGQGTLVTVSSGGSSRSSSSGGGGSGGGGEIVLTQSPATLSLSPGERATLSCRASQSVSSSYLAWYQQKPGQAPRLLIYGASSRATGIPARFSGSGSGTDFTLTISRLEPEDFAVYYCQTWDSFGQVFGQGTKVEIK

SEQ ID NO: 4931 - protein, 257 aa, synthetic construct
QVQLVESGGGVVQPGRSLRLSCAASGFTFSSYAMHWVRQAPGKGLEWVAVISYDGSNKYYADSVKGRFTISRDNSKNTLYLQMNSLRAEDTAVYYCAKDGHWYRGYYGSYYLDYWGQWGQGTLVTVSSGGSSRSSSSGGGGSGGGGEIVLTQSPATLSLSPGERATLSCRASQSVSSSYLAWYQQKPGQAPRLLIYGASSRATGIPARFSGSGSGTDFTLTISRLEPEDFAVYYCAARDDSLNGPWVFGQGTKVEIK

SEQ ID NO: 4932 - protein, 255 aa, synthetic construct
QVQLVESGGGVVQPGRSLRLSCAASGFTFSSYAMHWVRQAPGKGLEWVAVISYDGSNKYYADSVKGRFTISRDNSKNTLYLQMNSLRAEDTAVYYCAKDGHWYRGYYGSYYLDYWGQWGQGTLVTVSSGGSSRSSSSGGGGSGGGGEIVLTQSPATLSLSPGERATLSCRASQSVSSSYLAWYQQKPGQAPRLLIYGASSRATGIPARFSGSGSGTDFTLTISRLEPEDFAVYYCQQYYSPPPYTFGQGTKVEIK

SEQ ID NO: 4933 - protein, 256 aa, synthetic construct
QVQLVESGGGVVQPGRSLRLSCAASGFTFSSYAMHWVRQAPGKGLEWVAVISYDGSNKYYADSVKGRFTISRDNSKNTLYLQMNSLRAEDTAVYYCAKDGHWYRGYYGSYYLDYWGQWGQGTLVTVSSGGSSRSSSSGGGGSGGGGEIVLTQSPATLSLSPGERATLSCRASQSVSSSYLAWYQQKPGQAPRLLIYGASSRATGIPARFSGSGSGTDFTLTISRLEPEDFAVYYCQSYDSSLSGSVFGQGTKVEIK

SEQ ID NO: 4934 - protein, 249 aa, synthetic construct
QVQLVESGGGVVQPGRSLRLSCAASGFTFSSYAMHWVRQAPGKGLEWVAVISYDGSNKYYADSVKGRFTISRDNSKNTLYLQMNSLRAEDTAVYYCAKDHTMLGSFDYWGQWGQGTLVTVSSGGSSRSSSSGGGGSGGGGEIVLTQSPATLSLSPGERATLSCRASQSVSSSYLAWYQQKPGQAPRLLIYGASSRATGIPARFSGSGSGTDFTLTISRLEPEDFAVYYCQQSYSPTLWTFGQGTKVEIK

SEQ ID NO: 4935 - protein, 252 aa, synthetic construct
QVQLVESGGGVVQPGRSLRLSCAASGFTFSSYAMHWVRQAPGKGLEWVAVISYDGSNKYYADSVKGRFTISRDNSKNTLYLQMNSLRAEDTAVYYCAKDISSWYKSGAFGYWGQWGQGTLVTVSSGGSSRSSSSGGGGSGGGGEIVLTQSPATLSLSPGERATLSCRASQSVSSSYLAWYQQKPGQAPRLLIYGASSRATGIPARFSGSGSGTDFTLTISRLEPEDFAVYYCHAWDSFTASVFGQGTKVEIK

SEQ ID NO: 4936 - protein, 253 aa, synthetic construct
QVQLVESGGGVVQPGRSLRLSCAASGFTFSSYAMHWVRQAPGKGLEWVAVISYDGSNKYYADSVKGRFTISRDNSKNTLYLQMNSLRAEDTAVYYCAKDLGTGFMQGYWALDYWGQWGQGTLVTVSSGGSSRSSSSGGGGSGGGGEIVLTQSPATLSLSPGERATLSCRASQSVSSSYLAWYQQKPGQAPRLLIYGASSRATGIPARFSGSGSGTDFTLTISRLEPEDFAVYYCQQRSNWPLTFGQGTKVEIK

SEQ ID NO: 4937 - protein, 248 aa, synthetic construct
QVQLVESGGGVVQPGRSLRLSCAASGFTFSSYAMHWVRQAPGKGLEWVAVISYDGSNKYYADSVKGRFTISRDNSKNTLYLQMNSLRAEDTAVYYCAKDLRFSGVFDYWGQWGQGTLVTVSSGGSSRSSSSGGGGSGGGGEIVLTQSPATLSLSPGERATLSCRASQSVSSSYLAWYQQKPGQAPRLLIYGASSRATGIPARFSGSGSGTDFTLTISRLEPEDFAVYYCQQSYSTPRTFGQGTKVEIK

SEQ ID NO: 4938 - protein, 250 aa, synthetic construct
QVQLVESGGGVVQPGRSLRLSCAASGFTFSSYAMHWVRQAPGKGLEWVAVISYDGSNKYYADSVKGRFTISRDNSKNTLYLQMNSLRAEDTAVYYCAKDLRFSGVFDYWGQWGQGTLVTVSSGGSSRSSSSGGGGSGGGGEIVLTQSPATLSLSPGERATLSCRASQSVSSSYLAWYQQKPGQAPRLLIYGASSRATGIPARFSGSGSGTDFTLTISRLEPEDFAVYYCQVWDSSSLHRVFGQGTKVEIK

SEQ ID NO: 4939 - protein, 250 aa, synthetic construct
QVQLVESGGGVVQPGRSLRLSCAASGFTFSSYAMHWVRQAPGKGLEWVAVISYDGSNKYYADSVKGRFTISRDNSKNTLYLQMNSLRAEDTAVYYCAKDLRLVRVLDYWGQWGQGTLVTVSSGGSSRSSSSGGGGSGGGGEIVLTQSPATLSLSPGERATLSCRASQSVSSSYLAWYQQKPGQAPRLLIYGASSRATGIPARFSGSGSGTDFTLTISRLEPEDFAVYYCETWTNTYTRYVFGQGTKVEIK

SEQ ID NO: 4940 - protein, 250 aa, synthetic construct
QVQLVESGGGVVQPGRSLRLSCAASGFTFSSYAMHWVRQAPGKGLEWVAVISYDGSNKYYADSVKGRFTISRDNSKNTLYLQMNSLRAEDTAVYYCAKDLTFARALDYWGQWGQGTLVTVSSGGSSRSSSSGGGGSGGGGEIVLTQSPATLSLSPGERATLSCRASQSVSSSYLAWYQQKPGQAPRLLIYGASSRATGIPARFSGSGSGTDFTLTISRLEPEDFAVYYCAAWDDSLNPYVFGQGTKVEIK

SEQ ID NO: 4941 - protein, 252 aa, synthetic construct
QVQLVESGGGVVQPGRSLRLSCAASGFTFSSYAMHWVRQAPGKGLEWVAVISYDGSNKYYADSVKGRFTISRDNSKNTLYLQMNSLRAEDTAVYYCAKDLTFARALDYWGQWGQGTLVTVSSGGSSRSSSSGGGGSGGGGEIVLTQSPATLSLSPGERATLSCRASQSVSSSYLAWYQQKPGQAPRLLIYGASSRATGIPARFSGSGSGTDFTLTISRLEPEDFAVYYCGTWDSSLLSLLVVFGQGTKVEIK

SEQ ID NO: 4942 - protein, 248 aa, synthetic construct
QVQLVESGGGVVQPGRSLRLSCAASGFTFSSYAMHWVRQAPGKGLEWVAVISYDGSNKYYADSVKGRFTISRDNSKNTLYLQMNSLRAEDTAVYYCAKDLTFARALDYWGQWGQGTLVTVSSGGSSRSSSSGGGGSGGGGEIVLTQSPATLSLSPGERATLSCRASQSVSSSYLAWYQQKPGQAPRLLIYGASSRATGIPARFSGSGSGTDFTLTISRLEPEDFAVYYCQAWDSKTVVFGQGTKVEIK

SEQ ID NO: 4943 - protein, 249 aa, synthetic construct
QVQLVESGGGVVQPGRSLRLSCAASGFTFSSYAMHWVRQAPGKGLEWVAVISYDGSNKYYADSVKGRFTISRDNSKNTLYLQMNSLRAEDTAVYYCAKDLTFARALDYWGQWGQGTLVTVSSGGSSRSSSSGGGGSGGGGEIVLTQSPATLSLSPGERATLSCRASQSVSSSYLAWYQQKPGQAPRLLIYGASSRATGIPARFSGSGSGTDFTLTISRLEPEDFAVYYCQQYYSPPPYTFGQGTKVEIK

SEQ ID NO: 4944 - protein, 250 aa, synthetic construct
QVQLVESGGGVVQPGRSLRLSCAASGFTFSSYAMHWVRQAPGKGLEWVAVISYDGSNKYYADSVKGRFTISRDNSKNTLYLQMNSLRAEDTAVYYCAKDLTFARALDYWGQWGQGTLVTVSSGGSSRSSSSGGGGSGGGGEIVLTQSPATLSLSPGERATLSCRASQSVSSSYLAWYQQKPGQAPRLLIYGASSRATGIPARFSGSGSGTDFTLTISRLEPEDFAVYYCQSADSSAGFVVFGQGTKVEIK

SEQ ID NO: 4945 - protein, 249 aa, synthetic construct
QVQLVESGGGVVQPGRSLRLSCAASGFTFSSYAMHWVRQAPGKGLEWVAVISYDGSNKYYADSVKGRFTISRDNSKNTLYLQMNSLRAEDTAVYYCAKDLTGTWTLDLWGQWGQGTLVTVSSGGSSRSSSSGGGGSGGGGEIVLTQSPATLSLSPGERATLSCRASQSVSSSYLAWYQQKPGQAPRLLIYGASSRATGIPARFSGSGSGTDFTLTISRLEPEDFAVYYCQQRSNWPPYTFGQGTKVEIK

SEQ ID NO: 4946 - protein, 248 aa, synthetic construct
QVQLVESGGGVVQPGRSLRLSCAASGFTFSSYAMHWVRQAPGKGLEWVAVISYDGSNKYYADSVKGRFTISRDNSKNTLYLQMNSLRAEDTAVYYCAKDPSQKYYFDYWGQWGQGTLVTVSSGGSSRSSSSGGGGSGGGGEIVLTQSPATLSLSPGERATLSCRASQSVSSSYLAWYQQKPGQAPRLLIYGASSRATGIPARFSGSGSGTDFTLTISRLEPEDFAVYYCQQYYNWPQTFGQGTKVEIK

SEQ ID NO: 4947 - protein, 257 aa, synthetic construct
QVQLVESGGGVVQPGRSLRLSCAASGFTFSSYAMHWVRQAPGKGLEWVAVISYDGSNKYYADSVKGRFTISRDNSKNTLYLQMNSLRAEDTAVYYCAKDRPGPACNRYHNYGCNVWGQWGQGTLVTVSSGGSSRSSSSGGGGSGGGGEIVLTQSPATLSLSPGERATLSCRASQSVSSSYLAWYQQKPGQAPRLLIYGASSRATGIPARFSGSGSGTDFTLTISRLEPEDFAVYYCQVWNSSSDHWVFGQGTKVEIK

SEQ ID NO: 4948 - protein, 250 aa, synthetic construct
QVQLVESGGGVVQPGRSLRLSCAASGFTFSSYAMHWVRQAPGKGLEWVAVISYDGSNKYYADSVKGRFTISRDNSKNTLYLQMNSLRAEDTAVYYCAKDRRGAGYYYFDHWGQWGQGTLVTVSSGGSSRSSSSGGGGSGGGGEIVLTQSPATLSLSPGERATLSCRASQSVSSSYLAWYQQKPGQAPRLLIYGASSRATGIPARFSGSGSGTDFTLTISRLEPEDFAVYYCQQYYSTPLTFGQGTKVEIK

SEQ ID NO: 4949 - protein, 250 aa, synthetic construct
QVQLVESGGGVVQPGRSLRLSCAASGFTFSSYAMHWVRQAPGKGLEWVAVISYDGSNKYYADSVKGRFTISRDNSKNTLYLQMNSLRAEDTAVYYCAKDRRNWPRGYFDYWGQWGQGTLVTVSSGGSSRSSSSGGGGSGGGGEIVLTQSPATLSLSPGERATLSCRASQSVSSSYLAWYQQKPGQAPRLLIYGASSRATGIPARFSGSGSGTDFTLTISRLEPEDFAVYYCQAWDSSTVVFGQGTKVEIK

SEQ ID NO: 4950 - protein, 251 aa, synthetic construct
QVQLVESGGGVVQPGRSLRLSCAASGFTFSSYAMHWVRQAPGKGLEWVAVISYDGSNKYYADSVKGRFTISRDNSKNTLYLQMNSLRAEDTAVYYCAKDRRNWPRGYFDYWGQWGQGTLVTVSSGGSSRSSSSGGGGSGGGGEIVLTQSPATLSLSPGERATLSCRASQSVSSSYLAWYQQKPGQAPRLLIYGASSRATGIPARFSGSGSGTDFTLTISRLEPEDFAVYYCQSYTGGSSYVFGQGTKVEIK

SEQ ID NO: 4951 - protein, 254 aa, synthetic construct
QVQLVESGGGVVQPGRSLRLSCAASGFTFSSYAMHWVRQAPGKGLEWVAVISYDGSNKYYADSVKGRFTISRDNSKNTLYLQMNSLRAEDTAVYYCAKDWGWYRGYGHAGAVDIWGQWGQGTLVTVSSGGSSRSSSSGGGGSGGGGEIVLTQSPATLSLSPGERATLSCRASQSVSSSYLAWYQQKPGQAPRLLIYGASSRATGIPARFSGSGSGTDFTLTISRLEPEDFAVYYCETWDSDTYVFGQGTKVEIK

SEQ ID NO: 4952 - protein, 256 aa, synthetic construct
QVQLVESGGGVVQPGRSLRLSCAASGFTFSSYAMHWVRQAPGKGLEWVAVISYDGSNKYYADSVKGRFTISRDNSKNTLYLQMNSLRAEDTAVYYCAKDWGWYRGYGHAGAVDIWGQWGQGTLVTVSSGGSSRSSSSGGGGSGGGGEIVLTQSPATLSLSPGERATLSCRASQSVSSSYLAWYQQKPGQAPRLLIYGASSRATGIPARFSGSGSGTDFTLTISRLEPEDFAVYYCGAWDNSRHPEVFGQGTKVEIK

SEQ ID NO: 4953 - protein, 255 aa, synthetic construct
QVQLVESGGGVVQPGRSLRLSCAASGFTFSSYAMHWVRQAPGKGLEWVAVISYDGSNKYYADSVKGRFTISRDNSKNTLYLQMNSLRAEDTAVYYCAKDWGWYRGYGHAGAVDIWGQWGQGTLVTVSSGGSSRSSSSGGGGSGGGGEIVLTQSPATLSLSPGERATLSCRASQSVSSSYLAWYQQKPGQAPRLLIYGASSRATGIPARFSGSGSGTDFTLTISRLEPEDFAVYYCQAWDSSSTFVFGQGTKVEIK

SEQ ID NO: 4954 - protein, 254 aa, synthetic construct
QVQLVESGGGVVQPGRSLRLSCAASGFTFSSYAMHWVRQAPGKGLEWVAVISYDGSNKYYADSVKGRFTISRDNSKNTLYLQMNSLRAEDTAVYYCAKDWGWYRGYGHAGAVDIWGQWGQGTLVTVSSGGSSRSSSSGGGGSGGGGEIVLTQSPATLSLSPGERATLSCRASQSVSSSYLAWYQQKPGQAPRLLIYGASSRATGIPARFSGSGSGTDFTLTISRLEPEDFAVYYCQQSDSPPITFGQGTKVEIK

SEQ ID NO: 4955 - protein, 254 aa, synthetic construct
QVQLVESGGGVVQPGRSLRLSCAASGFTFSSYAMHWVRQAPGKGLEWVAVISYDGSNKYYADSVKGRFTISRDNSKNTLYLQMNSLRAEDTAVYYCAKDWGWYRGYGHAGAVDIWGQWGQGTLVTVSSGGSSRSSSSGGGGSGGGGEIVLTQSPATLSLSPGERATLSCRASQSVSSSYLAWYQQKPGQAPRLLIYGASSRATGIPARFSGSGSGTDFTLTISRLEPEDFAVYYCQQSYSPPITFGQGTKVEIK

SEQ ID NO: 4956 - protein, 256 aa, synthetic construct
QVQLVESGGGVVQPGRSLRLSCAASGFTFSSYAMHWVRQAPGKGLEWVAVISYDGSNKYYADSVKGRFTISRDNSKNTLYLQMNSLRAEDTAVYYCAKDWGWYRGYGHAGAVDIWGQWGQGTLVTVSSGGSSRSSSSGGGGSGGGGEIVLTQSPATLSLSPGERATLSCRASQSVSSSYLAWYQQKPGQAPRLLIYGASSRATGIPARFSGSGSGTDFTLTISRLEPEDFAVYYCQSYDTHLSGPIFGQGTKVEIK

SEQ ID NO: 4957 - protein, 256 aa, synthetic construct
QVQLVESGGGVVQPGRSLRLSCAASGFTFSSYAMHWVRQAPGKGLEWVAVISYDGSNKYYADSVKGRFTISRDNSKNTLYLQMNSLRAEDTAVYYCAKDWGWYRGYGHAGAVDIWGQWGQGTLVTVSSGGSSRSSSSGGGGSGGGGEIVLTQSPATLSLSPGERATLSCRASQSVSSSYLAWYQQKPGQAPRLLIYGASSRATGIPARFSGSGSGTDFTLTISRLEPEDFAVYYCVAWDDSLNGYVFGQGTKVEIK

SEQ ID NO: 4958 - protein, 248 aa, synthetic construct
QVQLVESGGGVVQPGRSLRLSCAASGFTFSSYAMHWVRQAPGKGLEWVAVISYDGSNKYYADSVKGRFTISRDNSKNTLYLQMNSLRAEDTAVYYCAKETTGIGAFDYWGQWGQGTLVTVSSGGSSRSSSSGGGGSGGGGEIVLTQSPATLSLSPGERATLSCRASQSVSSSYLAWYQQKPGQAPRLLIYGASSRATGIPARFSGSGSGTDFTLTISRLEPEDFAVYYCQQSYSPPPTFGQGTKVEIK

SEQ ID NO: 4959 - protein, 251 aa, synthetic construct
QVQLVESGGGVVQPGRSLRLSCAASGFTFSSYAMHWVRQAPGKGLEWVAVISYDGSNKYYADSVKGRFTISRDNSKNTLYLQMNSLRAEDTAVYYCAKETTGIGAFDYWGQWGQGTLVTVSSGGSSRSSSSGGGGSGGGGEIVLTQSPATLSLSPGERATLSCRASQSVSSSYLAWYQQKPGQAPRLLIYGASSRATGIPARFSGSGSGTDFTLTISRLEPEDFAVYYCSSYTSSSTPYVVFGQGTKVEIK

SEQ ID NO: 4960 - protein, 249 aa, synthetic construct
QVQLVESGGGVVQPGRSLRLSCAASGFTFSSYAMHWVRQAPGKGLEWVAVISYDGSNKYYADSVKGRFTISRDNSKNTLYLQMNSLRAEDTAVYYCAKGFLSSALDYWGQWGQGTLVTVSSGGSSRSSSSGGGGSGGGGEIVLTQSPATLSLSPGERATLSCRASQSVSSSYLAWYQQKPGQAPRLLIYGASSRATGIPARFSGSGSGTDFTLTISRLEPEDFAVYYCQVWDSVKEQVVFGQGTKVEIK

SEQ ID NO: 4961 - protein, 251 aa, synthetic construct
QVQLVESGGGVVQPGRSLRLSCAASGFTFSSYAMHWVRQAPGKGLEWVAVISYDGSNKYYADSVKGRFTISRDNSKNTLYLQMNSLRAEDTAVYYCAKGKDYFTTGYQDYWGQWGQGTLVTVSSGGSSRSSSSGGGGSGGGGEIVLTQSPATLSLSPGERATLSCRASQSVSSSYLAWYQQKPGQAPRLLIYGASSRATGIPARFSGSGSGTDFTLTISRLEPEDFAVYYCQQYYSATPPTFGQGTKVEIK

SEQ ID NO: 4962 - protein, 248 aa, synthetic construct
QVQLVESGGGVVQPGRSLRLSCAASGFTFSSYAMHWVRQAPGKGLEWVAVISYDGSNKYYADSVKGRFTISRDNSKNTLYLQMNSLRAEDTAVYYCAKGSTLGGSFDNWGQWGQGTLVTVSSGGSSRSSSSGGGGSGGGGEIVLTQSPATLSLSPGERATLSCRASQSVSSSYLAWYQQKPGQAPRLLIYGASSRATGIPARFSGSGSGTDFTLTISRLEPEDFAVYYCQQAYSPPITFGQGTKVEIK

SEQ ID NO: 4963 - protein, 246 aa, synthetic construct
QVQLVESGGGVVQPGRSLRLSCAASGFTFSSYAMHWVRQAPGKGLEWVAVISYDGSNKYYADSVKGRFTISRDNSKNTLYLQMNSLRAEDTAVYYCAKIWRRYFDYWGQWGQGTLVTVSSGGSSRSSSSGGGGSGGGGEIVLTQSPATLSLSPGERATLSCRASQSVSSSYLAWYQQKPGQAPRLLIYGASSRATGIPARFSGSGSGTDFTLTISRLEPEDFAVYYCQQANSFPPTFGQGTKVEIK

SEQ ID NO: 4964 - protein, 251 aa, synthetic construct
QVQLVESGGGVVQPGRSLRLSCAASGFTFSSYAMHWVRQAPGKGLEWVAVISYDGSNKYYADSVKGRFTISRDNSKNTLYLQMNSLRAEDTAVYYCAKRHDALWAFDYWGQWGQGTLVTVSSGGSSRSSSSGGGGSGGGGEIVLTQSPATLSLSPGERATLSCRASQSVSSSYLAWYQQKPGQAPRLLIYGASSRATGIPARFSGSGSGTDFTLTISRLEPEDFAVYYCNSRDSTDNHQAVFGQGTKVEIK

SEQ ID NO: 4965 - protein, 250 aa, synthetic construct
QVQLVESGGGVVQPGRSLRLSCAASGFTFSSYAMHWVRQAPGKGLEWVAVISYDGSNKYYADSVKGRFTISRDNSKNTLYLQMNSLRAEDTAVYYCAKSGSIWYYFDYWGQWGQGTLVTVSSGGSSRSSSSGGGGSGGGGEIVLTQSPATLSLSPGERATLSCRASQSVSSSYLAWYQQKPGQAPRLLIYGASSRATGIPARFSGSGSGTDFTLTISRLEPEDFAVYYCQAWDSNTANWVFGQGTKVEIK

SEQ ID NO: 4966 - protein, 248 aa, synthetic construct
QVQLVESGGGVVQPGRSLRLSCAASGFTFSSYAMHWVRQAPGKGLEWVAVISYDGSNKYYADSVKGRFTISRDNSKNTLYLQMNSLRAEDTAVYYCAKSNAATGAFDYWGQWGQGTLVTVSSGGSSRSSSSGGGGSGGGGEIVLTQSPATLSLSPGERATLSCRASQSVSSSYLAWYQQKPGQAPRLLIYGASSRATGIPARFSGSGSGTDFTLTISRLEPEDFAVYYCQQSYSAPITFGQGTKVEIK

SEQ ID NO: 4967 - protein, 251 aa, synthetic construct
QVQLVESGGGVVQPGRSLRLSCAASGFTFSSYAMHWVRQAPGKGLEWVAVISYDGSNKYYADSVKGRFTISRDNSKNTLYLQMNSLRAEDTAVYYCAKVIPEKVAGLDSWGQWGQGTLVTVSSGGSSRSSSSGGGGSGGGGEIVLTQSPATLSLSPGERATLSCRASQSVSSSYLAWYQQKPGQAPRLLIYGASSRATGIPARFSGSGSGTDFTLTISRLEPEDFAVYYCQVWDSSTNHVVFGQGTKVEIK

SEQ ID NO: 4968 - protein, 249 aa, synthetic construct
QVQLVESGGGVVQPGRSLRLSCAASGFTFSSYAMHWVRQAPGKGLEWVAVISYDGSNKYYADSVKGRFTISRDNSKNTLYLQMNSLRAEDTAVYYCAKVNIGLYGVDYWGQWGQGTLVTVSSGGSSRSSSSGGGGSGGGGEIVLTQSPATLSLSPGERATLSCRASQSVSSSYLAWYQQKPGQAPRLLIYGASSRATGIPARFSGSGSGTDFTLTISRLEPEDFAVYYCSSYTRRNTYVFGQGTKVEIK

SEQ ID NO: 4969 - protein, 250 aa, synthetic construct
QVQLVESGGGVVQPGRSLRLSCAASGFTFSSYAMHWVRQAPGKGLEWVAVISYDGSNKYYADSVKGRFTISRDNSKNTLYLQMNSLRAEDTAVYYCALEKQAPGAPGMDYWGQWGQGTLVTVSSGGSSRSSSSGGGGSGGGGEIVLTQSPATLSLSPGERATLSCRASQSVSSSYLAWYQQKPGQAPRLLIYGASSRATGIPARFSGSGSGTDFTLTISRLEPEDFAVYYCQQYDTLPITFGQGTKVEIK

SEQ ID NO: 4970 - protein, 250 aa, synthetic construct
QVQLVESGGGVVQPGRSLRLSCAASGFTFSSYAMHWVRQAPGKGLEWVAVISYDGSNKYYADSVKGRFTISRDNSKNTLYLQMNSLRAEDTAVYYCANYHWDDSSDGRIFDVWGQWGQGTLVTVSSGGSSRSSSSGGGGSGGGGEIVLTQSPATLSLSPGERATLSCRASQSVSSSYLAWYQQKPGQAPRLLIYGASSRATGIPARFSGSGSGTDFTLTISRLEPEDFAVYYCQTWGSWVFGQGTKVEIK

SEQ ID NO: 4971 - protein, 251 aa, synthetic construct
QVQLVESGGGVVQPGRSLRLSCAASGFTFSSYAMHWVRQAPGKGLEWVAVISYDGSNKYYADSVKGRFTISRDNSKNTLYLQMNSLRAEDTAVYYCARAGGSGSFYRLFDYWGQWGQGTLVTVSSGGSSRSSSSGGGGSGGGGEIVLTQSPATLSLSPGERATLSCRASQSVSSSYLAWYQQKPGQAPRLLIYGASSRATGIPARFSGSGSGTDFTLTISRLEPEDFAVYYCLQHNSYPFTFGQGTKVEIK

SEQ ID NO: 4972 - protein, 257 aa, synthetic construct
QVQLVESGGGVVQPGRSLRLSCAASGFTFSSYAMHWVRQAPGKGLEWVAVISYDGSNKYYADSVKGRFTISRDNSKNTLYLQMNSLRAEDTAVYYCARANYGFDYGSTYYSGNGFDYWGQWGQGTLVTVSSGGSSRSSSSGGGGSGGGGEIVLTQSPATLSLSPGERATLSCRASQSVSSSYLAWYQQKPGQAPRLLIYGASSRATGIPARFSGSGSGTDFTLTISRLEPEDFAVYYCQQSYSTRYTFGQGTKVEIK

SEQ ID NO: 4973 - protein, 244 aa, synthetic construct
QVQLVESGGGVVQPGRSLRLSCAASGFTFSSYAMHWVRQAPGKGLEWVAVISYDGSNKYYADSVKGRFTISRDNSKNTLYLQMNSLRAEDTAVYYCARASADDYWGQWGQGTLVTVSSGGSSRSSSSGGGGSGGGGEIVLTQSPATLSLSPGERATLSCRASQSVSSSYLAWYQQKPGQAPRLLIYGASSRATGIPARFSGSGSGTDFTLTISRLEPEDFAVYYCETWDSFHTVFGQGTKVEIK

SEQ ID NO: 4974 - protein, 252 aa, synthetic construct
QVQLVESGGGVVQPGRSLRLSCAASGFTFSSYAMHWVRQAPGKGLEWVAVISYDGSNKYYADSVKGRFTISRDNSKNTLYLQMNSLRAEDTAVYYCARDAAYGDVVRPAFDYWGQWGQGTLVTVSSGGSSRSSSSGGGGSGGGGEIVLTQSPATLSLSPGERATLSCRASQSVSSSYLAWYQQKPGQAPRLLIYGASSRATGIPARFSGSGSGTDFTLTISRLEPEDFAVYYCLQHNSYPLTFGQGTKVEIK

SEQ ID NO: 4975 - protein, 247 aa, synthetic construct
QVQLVESGGGVVQPGRSLRLSCAASGFTFSSYAMHWVRQAPGKGLEWVAVISYDGSNKYYADSVKGRFTISRDNSKNTLYLQMNSLRAEDTAVYYCARDAGSGLDYWGQWGQGTLVTVSSGGSSRSSSSGGGGSGGGGEIVLTQSPATLSLSPGERATLSCRASQSVSSSYLAWYQQKPGQAPRLLIYGASSRATGIPARFSGSGSGTDFTLTISRLEPEDFAVYYCQAWDSSPGFVFGQGTKVEIK

SEQ ID NO: 4976 - protein, 256 aa, synthetic construct
QVQLVESGGGVVQPGRSLRLSCAASGFTFSSYAMHWVRQAPGKGLEWVAVISYDGSNKYYADSVKGRFTISRDNSKNTLYLQMNSLRAEDTAVYYCARDATILGLDAHGHGFDHWGQWGQGTLVTVSSGGSSRSSSSGGGGSGGGGEIVLTQSPATLSLSPGERATLSCRASQSVSSSYLAWYQQKPGQAPRLLIYGASSRATGIPARFSGSGSGTDFTLTISRLEPEDFAVYYCQQYGSWPPSFTFGQGTKVEIK

SEQ ID NO: 4977 - protein, 252 aa, synthetic construct
QVQLVESGGGVVQPGRSLRLSCAASGFTFSSYAMHWVRQAPGKGLEWVAVISYDGSNKYYADSVKGRFTISRDNSKNTLYLQMNSLRAEDTAVYYCARDDSYRGPLHGYFDYWGQWGQGTLVTVSSGGSSRSSSSGGGGSGGGGEIVLTQSPATLSLSPGERATLSCRASQSVSSSYLAWYQQKPGQAPRLLIYGASSRATGIPARFSGSGSGTDFTLTISRLEPEDFAVYYCQQSYSPPPTFGQGTKVEIK

SEQ ID NO: 4978 - protein, 248 aa, synthetic construct
QVQLVESGGGVVQPGRSLRLSCAASGFTFSSYAMHWVRQAPGKGLEWVAVISYDGSNKYYADSVKGRFTISRDNSKNTLYLQMNSLRAEDTAVYYCARDGGDVMPFDYWGQWGQGTLVTVSSGGSSRSSSSGGGGSGGGGEIVLTQSPATLSLSPGERATLSCRASQSVSSSYLAWYQQKPGQAPRLLIYGASSRATGIPARFSGSGSGTDFTLTISRLEPEDFAVYYCKQYDSFPITFGQGTKVEIK

SEQ ID NO: 4979 - protein, 249 aa, synthetic construct
QVQLVESGGGVVQPGRSLRLSCAASGFTFSSYAMHWVRQAPGKGLEWVAVISYDGSNKYYADSVKGRFTISRDNSKNTLYLQMNSLRAEDTAVYYCARDGGVAAVDDWGQWGQGTLVTVSSGGSSRSSSSGGGGSGGGGEIVLTQSPATLSLSPGERATLSCRASQSVSSSYLAWYQQKPGQAPRLLIYGASSRATGIPARFSGSGSGTDFTLTISRLEPEDFAVYYCSSYTSSSTLVVFGQGTKVEIK

SEQ ID NO: 4980 - protein, 250 aa, synthetic construct
QVQLVESGGGVVQPGRSLRLSCAASGFTFSSYAMHWVRQAPGKGLEWVAVISYDGSNKYYADSVKGRFTISRDNSKNTLYLQMNSLRAEDTAVYYCARDGLKGYFGHWGQWGQGTLVTVSSGGSSRSSSSGGGGSGGGGEIVLTQSPATLSLSPGERATLSCRASQSVSSSYLAWYQQKPGQAPRLLIYGASSRATGIPARFSGSGSGTDFTLTISRLEPEDFAVYYCSSYTSSSSGLVVFGQGTKVEIK

SEQ ID NO: 4981 - protein, 255 aa, synthetic construct
QVQLVESGGGVVQPGRSLRLSCAASGFTFSSYAMHWVRQAPGKGLEWVAVISYDGSNKYYADSVKGRFTISRDNSKNTLYLQMNSLRAEDTAVYYCARDGSTTGISWGYGLDPWGQWGQGTLVTVSSGGSSRSSSSGGGGSGGGGEIVLTQSPATLSLSPGERATLSCRASQSVSSSYLAWYQQKPGQAPRLLIYGASSRATGIPARFSGSGSGTDFTLTISRLEPEDFAVYYCVGWDGSLSGEVFGQGTKVEIK

SEQ ID NO: 4982 - protein, 259 aa, synthetic construct
QVQLVESGGGVVQPGRSLRLSCAASGFTFSSYAMHWVRQAPGKGLEWVAVISYDGSNKYYADSVKGRFTISRDNSKNTLYLQMNSLRAEDTAVYYCARDGYFYRRNVTTYNSSYMDYWGQWGQGTLVTVSSGGSSRSSSSGGGGSGGGGEIVLTQSPATLSLSPGERATLSCRASQSVSSSYLAWYQQKPGQAPRLLIYGASSRATGIPARFSGSGSGTDFTLTISRLEPEDFAVYYCQSYDSINRDVVFGQGTKVEIK

SEQ ID NO: 4983 - protein, 259 aa, synthetic construct
QVQLVESGGGVVQPGRSLRLSCAASGFTFSSYAMHWVRQAPGKGLEWVAVISYDGSNKYYADSVKGRFTISRDNSKNTLYLQMNSLRAEDTAVYYCARDGYFYRRNVTTYYSSYMDYWGQWGQGTLVTVSSGGSSRSSSSGGGGSGGGGEIVLTQSPATLSLSPGERATLSCRASQSVSSSYLAWYQQKPGQAPRLLIYGASSRATGIPARFSGSGSGTDFTLTISRLEPEDFAVYYCGAWDSRSNVYVFGQGTKVEIK

SEQ ID NO: 4984 - protein, 259 aa, synthetic construct
QVQLVESGGGVVQPGRSLRLSCAASGFTFSSYAMHWVRQAPGKGLEWVAVISYDGSNKYYADSVKGRFTISRDNSKNTLYLQMNSLRAEDTAVYYCARDGYFYRRNVTTYYSSYMDYWGQWGQGTLVTVSSGGSSRSSSSGGGGSGGGGEIVLTQSPATLSLSPGERATLSCRASQSVSSSYLAWYQQKPGQAPRLLIYGASSRATGIPARFSGSGSGTDFTLTISRLEPEDFAVYYCGTWDSSLSAGVFGQGTKVEIK

SEQ ID NO: 4985 - protein, 257 aa, synthetic construct
QVQLVESGGGVVQPGRSLRLSCAASGFTFSSYAMHWVRQAPGKGLEWVAVISYDGSNKYYADSVKGRFTISRDNSKNTLYLQMNSLRAEDTAVYYCARDGYFYRRNVTTYYSSYMDYWGQWGQGTLVTVSSGGSSRSSSSGGGGSGGGGEIVLTQSPATLSLSPGERATLSCRASQSVSSSYLAWYQQKPGQAPRLLIYGASSRATGIPARFSGSGSGTDFTLTISRLEPEDFAVYYCQAWDSRTVVFGQGTKVEIK

SEQ ID NO: 4986 - protein, 248 aa, synthetic construct
QVQLVESGGGVVQPGRSLRLSCAASGFTFSSYAMHWVRQAPGKGLEWVAVISYDGSNKYYADSVKGRFTISRDNSKNTLYLQMNSLRAEDTAVYYCARDKGGMYGFDYWGQWGQGTLVTVSSGGSSRSSSSGGGGSGGGGEIVLTQSPATLSLSPGERATLSCRASQSVSSSYLAWYQQKPGQAPRLLIYGASSRATGIPARFSGSGSGTDFTLTISRLEPEDFAVYYCKQYDSFPITFGQGTKVEIK

SEQ ID NO: 4987 - protein, 246 aa, synthetic construct
QVQLVESGGGVVQPGRSLRLSCAASGFTFSSYAMHWVRQAPGKGLEWVAVISYDGSNKYYADSVKGRFTISRDNSKNTLYLQMNSLRAEDTAVYYCARDLGGRFTYWGQWGQGTLVTVSSGGSSRSSSSGGGGSGGGGEIVLTQSPATLSLSPGERATLSCRASQSVSSSYLAWYQQKPGQAPRLLIYGASSRATGIPARFSGSGSGTDFTLTISRLEPEDFAVYYCQQHSSPPITFGQGTKVEIK

SEQ ID NO: 4988 - protein, 249 aa, synthetic construct
QVQLVESGGGVVQPGRSLRLSCAASGFTFSSYAMHWVRQAPGKGLEWVAVISYDGSNKYYADSVKGRFTISRDNSKNTLYLQMNSLRAEDTAVYYCARDLPGYLTFDYWGQWGQGTLVTVSSGGSSRSSSSGGGGSGGGGEIVLTQSPATLSLSPGERATLSCRASQSVSSSYLAWYQQKPGQAPRLLIYGASSRATGIPARFSGSGSGTDFTLTISRLEPEDFAVYYCQQRSNSPGVTFGQGTKVEIK

SEQ ID NO: 4989 - protein, 251 aa, synthetic construct
QVQLVESGGGVVQPGRSLRLSCAASGFTFSSYAMHWVRQAPGKGLEWVAVISYDGSNKYYADSVKGRFTISRDNSKNTLYLQMNSLRAEDTAVYYCARDLRGAWGPGGFDVWGQWGQGTLVTVSSGGSSRSSSSGGGGSGGGGEIVLTQSPATLSLSPGERATLSCRASQSVSSSYLAWYQQKPGQAPRLLIYGASSRATGIPARFSGSGSGTDFTLTISRLEPEDFAVYYCQQYYTTPVTFGQGTKVEIK

SEQ ID NO: 4990 - protein, 258 aa, synthetic construct
QVQLVESGGGVVQPGRSLRLSCAASGFTFSSYAMHWVRQAPGKGLEWVAVISYDGSNKYYADSVKGRFTISRDNSKNTLYLQMNSLRAEDTAVYYCARDLTGYRSRSYQWDGMDVWGQWGQGTLVTVSSGGSSRSSSSGGGGSGGGGEIVLTQSPATLSLSPGERATLSCRASQSVSSSYLAWYQQKPGQAPRLLIYGASSRATGIPARFSGSGSGTDFTLTISRLEPEDFAVYYCASWDDSLNSGWVFGQGTKVEIK

SEQ ID NO: 4991 - protein, 249 aa, synthetic construct
QVQLVESGGGVVQPGRSLRLSCAASGFTFSSYAMHWVRQAPGKGLEWVAVISYDGSNKYYADSVKGRFTISRDNSKNTLYLQMNSLRAEDTAVYYCARDLYAIGAGMDPWGQWGQGTLVTVSSGGSSRSSSSGGGGSGGGGEIVLTQSPATLSLSPGERATLSCRASQSVSSSYLAWYQQKPGQAPRLLIYGASSRATGIPARFSGSGSGTDFTLTISRLEPEDFAVYYCQTWDSFGQVFGQGTKVEIK

SEQ ID NO: 4992 - protein, 250 aa, synthetic construct
QVQLVESGGGVVQPGRSLRLSCAASGFTFSSYAMHWVRQAPGKGLEWVAVISYDGSNKYYADSVKGRFTISRDNSKNTLYLQMNSLRAEDTAVYYCARDMAGYNWIDFWGQWGQGTLVTVSSGGSSRSSSSGGGGSGGGGEIVLTQSPATLSLSPGERATLSCRASQSVSSSYLAWYQQKPGQAPRLLIYGASSRATGIPARFSGSGSGTDFTLTISRLEPEDFAVYYCAAWDDSLNLPVFGQGTKVEIK

SEQ ID NO: 4993 - protein, 253 aa, synthetic construct
QVQLVESGGGVVQPGRSLRLSCAASGFTFSSYAMHWVRQAPGKGLEWVAVISYDGSNKYYADSVKGRFTISRDNSKNTLYLQMNSLRAEDTAVYYCARDPRGWGYAYGDFWGQWGQGTLVTVSSGGSSRSSSSGGGGSGGGGEIVLTQSPATLSLSPGERATLSCRASQSVSSSYLAWYQQKPGQAPRLLIYGASSRATGIPARFSGSGSGTDFTLTISRLEPEDFAVYYCAAWDSSSGRRWVFGQGTKVEIK

SEQ ID NO: 4994 - protein, 247 aa, synthetic construct
QVQLVESGGGVVQPGRSLRLSCAASGFTFSSYAMHWVRQAPGKGLEWVAVISYDGSNKYYADSVKGRFTISRDNSKNTLYLQMNSLRAEDTAVYYCARDPSGHGMDVWGQWGQGTLVTVSSGGSSRSSSSGGGGSGGGGEIVLTQSPATLSLSPGERATLSCRASQSVSSSYLAWYQQKPGQAPRLLIYGASSRATGIPARFSGSGSGTDFTLTISRLEPEDFAVYYCQQSYSLPRTFGQGTKVEIK

SEQ ID NO: 4995 - protein, 251 aa, synthetic construct
QVQLVESGGGVVQPGRSLRLSCAASGFTFSSYAMHWVRQAPGKGLEWVAVISYDGSNKYYADSVKGRFTISRDNSKNTLYLQMNSLRAEDTAVYYCARDQGYYGGSRASEYWGQWGQGTLVTVSSGGSSRSSSSGGGGSGGGGEIVLTQSPATLSLSPGERATLSCRASQSVSSSYLAWYQQKPGQAPRLLIYGASSRATGIPARFSGSGSGTDFTLTISRLEPEDFAVYYCQQYYNPPQTFGQGTKVEIK

SEQ ID NO: 4996 - protein, 250 aa, synthetic construct
QVQLVESGGGVVQPGRSLRLSCAASGFTFSSYAMHWVRQAPGKGLEWVAVISYDGSNKYYADSVKGRFTISRDNSKNTLYLQMNSLRAEDTAVYYCARDRAGDGMDGWGQWGQGTLVTVSSGGSSRSSSSGGGGSGGGGEIVLTQSPATLSLSPGERATLSCRASQSVSSSYLAWYQQKPGQAPRLLIYGASSRATGIPARFSGSGSGTDFTLTISRLEPEDFAVYYCQSYDSSLNPYVVFGQGTKVEIK

SEQ ID NO: 4997 - protein, 250 aa, synthetic construct
QVQLVESGGGVVQPGRSLRLSCAASGFTFSSYAMHWVRQAPGKGLEWVAVISYDGSNKYYADSVKGRFTISRDNSKNTLYLQMNSLRAEDTAVYYCARDRGGRDGYGMDVWGQWGQGTLVTVSSGGSSRSSSSGGGGSGGGGEIVLTQSPATLSLSPGERATLSCRASQSVSSSYLAWYQQKPGQAPRLLIYGASSRATGIPARFSGSGSGTDFTLTISRLEPEDFAVYYCQQADNFPLTFGQGTKVEIK

SEQ ID NO: 4998 - protein, 250 aa, synthetic construct
QVQLVESGGGVVQPGRSLRLSCAASGFTFSSYAMHWVRQAPGKGLEWVAVISYDGSNKYYADSVKGRFTISRDNSKNTLYLQMNSLRAEDTAVYYCARDRGGRDGYGMDVWGQWGQGTLVTVSSGGSSRSSSSGGGGSGGGGEIVLTQSPATLSLSPGERATLSCRASQSVSSSYLAWYQQKPGQAPRLLIYGASSRATGIPARFSGSGSGTDFTLTISRLEPEDFAVYYCQQEDNYPLTFGQGTKVEIK

SEQ ID NO: 4999 - protein, 250 aa, synthetic construct
QVQLVESGGGVVQPGRSLRLSCAASGFTFSSYAMHWVRQAPGKGLEWVAVISYDGSNKYYADSVKGRFTISRDNSKNTLYLQMNSLRAEDTAVYYCARDRGGRDGYGMDVWGQWGQGTLVTVSSGGSSRSSSSGGGGSGGGGEIVLTQSPATLSLSPGERATLSCRASQSVSSSYLAWYQQKPGQAPRLLIYGASSRATGIPARFSGSGSGTDFTLTISRLEPEDFAVYYCQQEDSPPLTFGQGTKVEIK

SEQ ID NO: 5000 - protein, 250 aa, synthetic construct
QVQLVESGGGVVQPGRSLRLSCAASGFTFSSYAMHWVRQAPGKGLEWVAVISYDGSNKYYADSVKGRFTISRDNSKNTLYLQMNSLRAEDTAVYYCARDRGGRDGYGMDVWGQWGQGTLVTVSSGGSSRSSSSGGGGSGGGGEIVLTQSPATLSLSPGERATLSCRASQSVSSSYLAWYQQKPGQAPRLLIYGASSRATGIPARFSGSGSGTDFTLTISRLEPEDFAVYYCQQSYSPPPTFGQGTKVEIK

SEQ ID NO: 5001 - protein, 248 aa, synthetic construct
QVQLVESGGGVVQPGRSLRLSCAASGFTFSSYAMHWVRQAPGKGLEWVAVISYDGSNKYYADSVKGRFTISRDNSKNTLYLQMNSLRAEDTAVYYCARDRGTFPLFDSWGQWGQGTLVTVSSGGSSRSSSSGGGGSGGGGEIVLTQSPATLSLSPGERATLSCRASQSVSSSYLAWYQQKPGQAPRLLIYGASSRATGIPARFSGSGSGTDFTLTISRLEPEDFAVYYCGSYADGRYVFGQGTKVEIK

SEQ ID NO: 5002 - protein, 255 aa, synthetic construct
QVQLVESGGGVVQPGRSLRLSCAASGFTFSSYAMHWVRQAPGKGLEWVAVISYDGSNKYYADSVKGRFTISRDNSKNTLYLQMNSLRAEDTAVYYCARDRGYRGYYAGNWFDPWGQWGQGTLVTVSSGGSSRSSSSGGGGSGGGGEIVLTQSPATLSLSPGERATLSCRASQSVSSSYLAWYQQKPGQAPRLLIYGASSRATGIPARFSGSGSGTDFTLTISRLEPEDFAVYYCQAWDSSTNHVVFGQGTKVEIK

SEQ ID NO: 5003 - protein, 253 aa, synthetic construct
QVQLVESGGGVVQPGRSLRLSCAASGFTFSSYAMHWVRQAPGKGLEWVAVISYDGSNKYYADSVKGRFTISRDNSKNTLYLQMNSLRAEDTAVYYCARDRGYRGYYAGNWFDPWGQWGQGTLVTVSSGGSSRSSSSGGGGSGGGGEIVLTQSPATLSLSPGERATLSCRASQSVSSSYLAWYQQKPGQAPRLLIYGASSRATGIPARFSGSGSGTDFTLTISRLEPEDFAVYYCQQSDSPPITFGQGTKVEIK

SEQ ID NO: 5004 - protein, 250 aa, synthetic construct
QVQLVESGGGVVQPGRSLRLSCAASGFTFSSYAMHWVRQAPGKGLEWVAVISYDGSNKYYADSVKGRFTISRDNSKNTLYLQMNSLRAEDTAVYYCARDRIVPAGSDYWGQWGQGTLVTVSSGGSSRSSSSGGGGSGGGGEIVLTQSPATLSLSPGERATLSCRASQSVSSSYLAWYQQKPGQAPRLLIYGASSRATGIPARFSGSGSGTDFTLTISRLEPEDFAVYYCASYTPSRNTYVFGQGTKVEIK

SEQ ID NO: 5005 - protein, 248 aa, synthetic construct
QVQLVESGGGVVQPGRSLRLSCAASGFTFSSYAMHWVRQAPGKGLEWVAVISYDGSNKYYADSVKGRFTISRDNSKNTLYLQMNSLRAEDTAVYYCARDRIVPAGSDYWGQWGQGTLVTVSSGGSSRSSSSGGGGSGGGGEIVLTQSPATLSLSPGERATLSCRASQSVSSSYLAWYQQKPGQAPRLLIYGASSRATGIPARFSGSGSGTDFTLTISRLEPEDFAVYYCQAWDSRTVVFGQGTKVEIK

SEQ ID NO: 5006 - protein, 248 aa, synthetic construct
QVQLVESGGGVVQPGRSLRLSCAASGFTFSSYAMHWVRQAPGKGLEWVAVISYDGSNKYYADSVKGRFTISRDNSKNTLYLQMNSLRAEDTAVYYCARDRIVPAGSDYWGQWGQGTLVTVSSGGSSRSSSSGGGGSGGGGEIVLTQSPATLSLSPGERATLSCRASQSVSSSYLAWYQQKPGQAPRLLIYGASSRATGIPARFSGSGSGTDFTLTISRLEPEDFAVYYCQAWDSSIWVFGQGTKVEIK

SEQ ID NO: 5007 - protein, 248 aa, synthetic construct
QVQLVESGGGVVQPGRSLRLSCAASGFTFSSYAMHWVRQAPGKGLEWVAVISYDGSNKYYADSVKGRFTISRDNSKNTLYLQMNSLRAEDTAVYYCARDRIVPAGSDYWGQWGQGTLVTVSSGGSSRSSSSGGGGSGGGGEIVLTQSPATLSLSPGERATLSCRASQSVSSSYLAWYQQKPGQAPRLLIYGASSRATGIPARFSGSGSGTDFTLTISRLEPEDFAVYYCQAWDSSTVVFGQGTKVEIK

SEQ ID NO: 5008 - protein, 248 aa, synthetic construct
QVQLVESGGGVVQPGRSLRLSCAASGFTFSSYAMHWVRQAPGKGLEWVAVISYDGSNKYYADSVKGRFTISRDNSKNTLYLQMNSLRAEDTAVYYCARDRIVPAGSDYWGQWGQGTLVTVSSGGSSRSSSSGGGGSGGGGEIVLTQSPATLSLSPGERATLSCRASQSVSSSYLAWYQQKPGQAPRLLIYGASSRATGIPARFSGSGSGTDFTLTISRLEPEDFAVYYCQSWDSFGQVFGQGTKVEIK

SEQ ID NO: 5009 - protein, 249 aa, synthetic construct
QVQLVESGGGVVQPGRSLRLSCAASGFTFSSYAMHWVRQAPGKGLEWVAVISYDGSNKYYADSVKGRFTISRDNSKNTLYLQMNSLRAEDTAVYYCARDRIVPAGSDYWGQWGQGTLVTVSSGGSSRSSSSGGGGSGGGGEIVLTQSPATLSLSPGERATLSCRASQSVSSSYLAWYQQKPGQAPRLLIYGASSRATGIPARFSGSGSGTDFTLTISRLEPEDFAVYYCQSYDSMSGWIFGQGTKVEIK

SEQ ID NO: 5010 - protein, 248 aa, synthetic construct
QVQLVESGGGVVQPGRSLRLSCAASGFTFSSYAMHWVRQAPGKGLEWVAVISYDGSNKYYADSVKGRFTISRDNSKNTLYLQMNSLRAEDTAVYYCARDRIVPAGSDYWGQWGQGTLVTVSSGGSSRSSSSGGGGSGGGGEIVLTQSPATLSLSPGERATLSCRASQSVSSSYLAWYQQKPGQAPRLLIYGASSRATGIPARFSGSGSGTDFTLTISRLEPEDFAVYYCQTWDSFGLVFGQGTKVEIK

SEQ ID NO: 5011 - protein, 249 aa, synthetic construct
QVQLVESGGGVVQPGRSLRLSCAASGFTFSSYAMHWVRQAPGKGLEWVAVISYDGSNKYYADSVKGRFTISRDNSKNTLYLQMNSLRAEDTAVYYCARDRPWMYPDLWGQWGQGTLVTVSSGGSSRSSSSGGGGSGGGGEIVLTQSPATLSLSPGERATLSCRASQSVSSSYLAWYQQKPGQAPRLLIYGASSRATGIPARFSGSGSGTDFTLTISRLEPEDFAVYYCQVWDSSSDHWVFGQGTKVEIK

SEQ ID NO: 5012 - protein, 247 aa, synthetic construct
QVQLVESGGGVVQPGRSLRLSCAASGFTFSSYAMHWVRQAPGKGLEWVAVISYDGSNKYYADSVKGRFTISRDNSKNTLYLQMNSLRAEDTAVYYCARDRRDLTLDYWGQWGQGTLVTVSSGGSSRSSSSGGGGSGGGGEIVLTQSPATLSLSPGERATLSCRASQSVSSSYLAWYQQKPGQAPRLLIYGASSRATGIPARFSGSGSGTDFTLTISRLEPEDFAVYYCQAWDSLTAVFGQGTKVEIK

SEQ ID NO: 5013 - protein, 249 aa, synthetic construct
QVQLVESGGGVVQPGRSLRLSCAASGFTFSSYAMHWVRQAPGKGLEWVAVISYDGSNKYYADSVKGRFTISRDNSKNTLYLQMNSLRAEDTAVYYCARDRTGITGFDYWGQWGQGTLVTVSSGGSSRSSSSGGGGSGGGGEIVLTQSPATLSLSPGERATLSCRASQSVSSSYLAWYQQKPGQAPRLLIYGASSRATGIPARFSGSGSGTDFTLTISRLEPEDFAVYYCQAWDSSATVVFGQGTKVEIK

SEQ ID NO: 5014 - protein, 257 aa, synthetic construct
QVQLVESGGGVVQPGRSLRLSCAASGFTFSSYAMHWVRQAPGKGLEWVAVISYDGSNKYYADSVKGRFTISRDNSKNTLYLQMNSLRAEDTAVYYCARDSGGYRTSGPYFQGYAMDVWGQWGQGTLVTVSSGGSSRSSSSGGGGSGGGGEIVLTQSPATLSLSPGERATLSCRASQSVSSSYLAWYQQKPGQAPRLLIYGASSRATGIPARFSGSGSGTDFTLTISRLEPEDFAVYYCQQSYSPPPTFGQGTKVEIK

SEQ ID NO: 5015 - protein, 259 aa, synthetic construct
QVQLVESGGGVVQPGRSLRLSCAASGFTFSSYAMHWVRQAPGKGLEWVAVISYDGSNKYYADSVKGRFTISRDNSKNTLYLQMNSLRAEDTAVYYCARDSGGYRTSGPYFQGYAMDVWGQWGQGTLVTVSSGGSSRSSSSGGGGSGGGGEIVLTQSPATLSLSPGERATLSCRASQSVSSSYLAWYQQKPGQAPRLLIYGASSRATGIPARFSGSGSGTDFTLTISRLEPEDFAVYYCQQYNNWPPPRTFGQGTKVEIK

SEQ ID NO: 5016 - protein, 249 aa, synthetic construct
QVQLVESGGGVVQPGRSLRLSCAASGFTFSSYAMHWVRQAPGKGLEWVAVISYDGSNKYYADSVKGRFTISRDNSKNTLYLQMNSLRAEDTAVYYCARDSHYYGMDVWGQWGQGTLVTVSSGGSSRSSSSGGGGSGGGGEIVLTQSPATLSLSPGERATLSCRASQSVSSSYLAWYQQKPGQAPRLLIYGASSRATGIPARFSGSGSGTDFTLTISRLEPEDFAVYYCSSFTPSSTFVVFGQGTKVEIK

SEQ ID NO: 5017 - protein, 246 aa, synthetic construct
QVQLVESGGGVVQPGRSLRLSCAASGFTFSSYAMHWVRQAPGKGLEWVAVISYDGSNKYYADSVKGRFTISRDNSKNTLYLQMNSLRAEDTAVYYCARDSKGYLDYWGQWGQGTLVTVSSGGSSRSSSSGGGGSGGGGEIVLTQSPATLSLSPGERATLSCRASQSVSSSYLAWYQQKPGQAPRLLIYGASSRATGIPARFSGSGSGTDFTLTISRLEPEDFAVYYCQQEDSPPITFGQGTKVEIK

SEQ ID NO: 5018 - protein, 247 aa, synthetic construct
QVQLVESGGGVVQPGRSLRLSCAASGFTFSSYAMHWVRQAPGKGLEWVAVISYDGSNKYYADSVKGRFTISRDNSKNTLYLQMNSLRAEDTAVYYCARDVGVGATDYWGQWGQGTLVTVSSGGSSRSSSSGGGGSGGGGEIVLTQSPATLSLSPGERATLSCRASQSVSSSYLAWYQQKPGQAPRLLIYGASSRATGIPARFSGSGSGTDFTLTISRLEPEDFAVYYCQQSYSPPITFGQGTKVEIK

SEQ ID NO: 5019 - protein, 247 aa, synthetic construct
QVQLVESGGGVVQPGRSLRLSCAASGFTFSSYAMHWVRQAPGKGLEWVAVISYDGSNKYYADSVKGRFTISRDNSKNTLYLQMNSLRAEDTAVYYCAREAGYYGMDVWGQWGQGTLVTVSSGGSSRSSSSGGGGSGGGGEIVLTQSPATLSLSPGERATLSCRASQSVSSSYLAWYQQKPGQAPRLLIYGASSRATGIPARFSGSGSGTDFTLTISRLEPEDFAVYYCQQYDSPPLTFGQGTKVEIK

SEQ ID NO: 5020 - protein, 255 aa, synthetic construct
QVQLVESGGGVVQPGRSLRLSCAASGFTFSSYAMHWVRQAPGKGLEWVAVISYDGSNKYYADSVKGRFTISRDNSKNTLYLQMNSLRAEDTAVYYCAREGATGTLQGAAQYGMDVWGQWGQGTLVTVSSGGSSRSSSSGGGGSGGGGEIVLTQSPATLSLSPGERATLSCRASQSVSSSYLAWYQQKPGQAPRLLIYGASSRATGIPARFSGSGSGTDFTLTISRLEPEDFAVYYCQQYNNPPVTFGQGTKVEIK

SEQ ID NO: 5021 - protein, 249 aa, synthetic construct
QVQLVESGGGVVQPGRSLRLSCAASGFTFSSYAMHWVRQAPGKGLEWVAVISYDGSNKYYADSVKGRFTISRDNSKNTLYLQMNSLRAEDTAVYYCAREIGNVYYGFDYWGQWGQGTLVTVSSGGSSRSSSSGGGGSGGGGEIVLTQSPATLSLSPGERATLSCRASQSVSSSYLAWYQQKPGQAPRLLIYGASSRATGIPARFSGSGSGTDFTLTISRLEPEDFAVYYCQQSDSPPITFGQGTKVEIK

SEQ ID NO: 5022 - protein, 255 aa, synthetic construct
QVQLVESGGGVVQPGRSLRLSCAASGFTFSSYAMHWVRQAPGKGLEWVAVISYDGSNKYYADSVKGRFTISRDNSKNTLYLQMNSLRAEDTAVYYCARERFQTISYTTGFDIWGQWGQGTLVTVSSGGSSRSSSSGGGGSGGGGEIVLTQSPATLSLSPGERATLSCRASQSVSSSYLAWYQQKPGQAPRLLIYGASSRATGIPARFSGSGSGTDFTLTISRLEPEDFAVYYCGTWDSRLLSGGMFGQGTKVEIK

SEQ ID NO: 5023 - protein, 255 aa, synthetic construct
QVQLVESGGGVVQPGRSLRLSCAASGFTFSSYAMHWVRQAPGKGLEWVAVISYDGSNKYYADSVKGRFTISRDNSKNTLYLQMNSLRAEDTAVYYCARERFQTISYTTGFDIWGQWGQGTLVTVSSGGSSRSSSSGGGGSGGGGEIVLTQSPATLSLSPGERATLSCRASQSVSSSYLAWYQQKPGQAPRLLIYGASSRATGIPARFSGSGSGTDFTLTISRLEPEDFAVYYCGTWDSSLLSAWVFGQGTKVEIK

SEQ ID NO: 5024 - protein, 252 aa, synthetic construct
QVQLVESGGGVVQPGRSLRLSCAASGFTFSSYAMHWVRQAPGKGLEWVAVISYDGSNKYYADSVKGRFTISRDNSKNTLYLQMNSLRAEDTAVYYCARERFQTISYTTGFDIWGQWGQGTLVTVSSGGSSRSSSSGGGGSGGGGEIVLTQSPATLSLSPGERATLSCRASQSVSSSYLAWYQQKPGQAPRLLIYGASSRATGIPARFSGSGSGTDFTLTISRLEPEDFAVYYCQAWDSRTGVFGQGTKVEIK

SEQ ID NO: 5025 - protein, 252 aa, synthetic construct
QVQLVESGGGVVQPGRSLRLSCAASGFTFSSYAMHWVRQAPGKGLEWVAVISYDGSNKYYADSVKGRFTISRDNSKNTLYLQMNSLRAEDTAVYYCARERFQTISYTTGFDIWGQWGQGTLVTVSSGGSSRSSSSGGGGSGGGGEIVLTQSPATLSLSPGERATLSCRASQSVSSSYLAWYQQKPGQAPRLLIYGASSRATGIPARFSGSGSGTDFTLTISRLEPEDFAVYYCQAWDSSTVVFGQGTKVEIK

SEQ ID NO: 5026 - protein, 252 aa, synthetic construct
QVQLVESGGGVVQPGRSLRLSCAASGFTFSSYAMHWVRQAPGKGLEWVAVISYDGSNKYYADSVKGRFTISRDNSKNTLYLQMNSLRAEDTAVYYCARERFQTISYTTGFDIWGQWGQGTLVTVSSGGSSRSSSSGGGGSGGGGEIVLTQSPATLSLSPGERATLSCRASQSVSSSYLAWYQQKPGQAPRLLIYGASSRATGIPARFSGSGSGTDFTLTISRLEPEDFAVYYCQQSDSPPLTFGQGTKVEIK

SEQ ID NO: 5027 - protein, 256 aa, synthetic construct
QVQLVESGGGVVQPGRSLRLSCAASGFTFSSYAMHWVRQAPGKGLEWVAVISYDGSNKYYADSVKGRFTISRDNSKNTLYLQMNSLRAEDTAVYYCARERFQTISYTTGFDIWGQWGQGTLVTVSSGGSSRSSSSGGGGSGGGGEIVLTQSPATLSLSPGERATLSCRASQSVSSSYLAWYQQKPGQAPRLLIYGASSRATGIPARFSGSGSGTDFTLTISRLEPEDFAVYYCQVWDSSSDHDHVVFGQGTKVEIK

SEQ ID NO: 5028 - protein, 255 aa, synthetic construct
QVQLVESGGGVVQPGRSLRLSCAASGFTFSSYAMHWVRQAPGKGLEWVAVISYDGSNKYYADSVKGRFTISRDNSKNTLYLQMNSLRAEDTAVYYCARERGVTRPFYYSGYGMDVWGQWGQGTLVTVSSGGSSRSSSSGGGGSGGGGEIVLTQSPATLSLSPGERATLSCRASQSVSSSYLAWYQQKPGQAPRLLIYGASSRATGIPARFSGSGSGTDFTLTISRLEPEDFAVYYCQQYASPPVSFGQGTKVEIK

SEQ ID NO: 5029 - protein, 255 aa, synthetic construct
QVQLVESGGGVVQPGRSLRLSCAASGFTFSSYAMHWVRQAPGKGLEWVAVISYDGSNKYYADSVKGRFTISRDNSKNTLYLQMNSLRAEDTAVYYCARERYNYSRGKLGIPAMDIWGQWGQGTLVTVSSGGSSRSSSSGGGGSGGGGEIVLTQSPATLSLSPGERATLSCRASQSVSSSYLAWYQQKPGQAPRLLIYGASSRATGIPARFSGSGSGTDFTLTISRLEPEDFAVYYCQQYDNLPITFGQGTKVEIK

SEQ ID NO: 5030 - protein, 249 aa, synthetic construct
QVQLVESGGGVVQPGRSLRLSCAASGFTFSSYAMHWVRQAPGKGLEWVAVISYDGSNKYYADSVKGRFTISRDNSKNTLYLQMNSLRAEDTAVYYCAREWGGSWFGMDPWGQWGQGTLVTVSSGGSSRSSSSGGGGSGGGGEIVLTQSPATLSLSPGERATLSCRASQSVSSSYLAWYQQKPGQAPRLLIYGASSRATGIPARFSGSGSGTDFTLTISRLEPEDFAVYYCQQAYSPPVTFGQGTKVEIK

SEQ ID NO: 5031 - protein, 248 aa, synthetic construct
QVQLVESGGGVVQPGRSLRLSCAASGFTFSSYAMHWVRQAPGKGLEWVAVISYDGSNKYYADSVKGRFTISRDNSKNTLYLQMNSLRAEDTAVYYCARFRSSNRGFDVWGQWGQGTLVTVSSGGSSRSSSSGGGGSGGGGEIVLTQSPATLSLSPGERATLSCRASQSVSSSYLAWYQQKPGQAPRLLIYGASSRATGIPARFSGSGSGTDFTLTISRLEPEDFAVYYCMQGTHWPPTFGQGTKVEIK

SEQ ID NO: 5032 - protein, 255 aa, synthetic construct
QVQLVESGGGVVQPGRSLRLSCAASGFTFSSYAMHWVRQAPGKGLEWVAVISYDGSNKYYADSVKGRFTISRDNSKNTLYLQMNSLRAEDTAVYYCARGGYRDWLKQSYYFDYWGQWGQGTLVTVSSGGSSRSSSSGGGGSGGGGEIVLTQSPATLSLSPGERATLSCRASQSVSSSYLAWYQQKPGQAPRLLIYGASSRATGIPARFSGSGSGTDFTLTISRLEPEDFAVYYCQTWDSRLNSAVFGQGTKVEIK

SEQ ID NO: 5033 - protein, 247 aa, synthetic construct
QVQLVESGGGVVQPGRSLRLSCAASGFTFSSYAMHWVRQAPGKGLEWVAVISYDGSNKYYADSVKGRFTISRDNSKNTLYLQMNSLRAEDTAVYYCARGKAWGWFDPWGQWGQGTLVTVSSGGSSRSSSSGGGGSGGGGEIVLTQSPATLSLSPGERATLSCRASQSVSSSYLAWYQQKPGQAPRLLIYGASSRATGIPARFSGSGSGTDFTLTISRLEPEDFAVYYCQQYDSTPYTFGQGTKVEIK

SEQ ID NO: 5034 - protein, 247 aa, synthetic construct
QVQLVESGGGVVQPGRSLRLSCAASGFTFSSYAMHWVRQAPGKGLEWVAVISYDGSNKYYADSVKGRFTISRDNSKNTLYLQMNSLRAEDTAVYYCARGKAWGWFDPWGQWGQGTLVTVSSGGSSRSSSSGGGGSGGGGEIVLTQSPATLSLSPGERATLSCRASQSVSSSYLAWYQQKPGQAPRLLIYGASSRATGIPARFSGSGSGTDFTLTISRLEPEDFAVYYCQQYNNWPYTFGQGTKVEIK

SEQ ID NO: 5035 - protein, 247 aa, synthetic construct
QVQLVESGGGVVQPGRSLRLSCAASGFTFSSYAMHWVRQAPGKGLEWVAVISYDGSNKYYADSVKGRFTISRDNSKNTLYLQMNSLRAEDTAVYYCARGKSLGALDYWGQWGQGTLVTVSSGGSSRSSSSGGGGSGGGGEIVLTQSPATLSLSPGERATLSCRASQSVSSSYLAWYQQKPGQAPRLLIYGASSRATGIPARFSGSGSGTDFTLTISRLEPEDFAVYYCQQSYSPPITFGQGTKVEIK

SEQ ID NO: 5036 - protein, 255 aa, synthetic construct
QVQLVESGGGVVQPGRSLRLSCAASGFTFSSYAMHWVRQAPGKGLEWVAVISYDGSNKYYADSVKGRFTISRDNSKNTLYLQMNSLRAEDTAVYYCARGLRGYRGGGTYDAFDVWGQWGQGTLVTVSSGGSSRSSSSGGGGSGGGGEIVLTQSPATLSLSPGERATLSCRASQSVSSSYLAWYQQKPGQAPRLLIYGASSRATGIPARFSGSGSGTDFTLTISRLEPEDFAVYYCQAWDSSSAYVFGQGTKVEIK

SEQ ID NO: 5037 - protein, 252 aa, synthetic construct
QVQLVESGGGVVQPGRSLRLSCAASGFTFSSYAMHWVRQAPGKGLEWVAVISYDGSNKYYADSVKGRFTISRDNSKNTLYLQMNSLRAEDTAVYYCARGPYRRSYFSYGMDVWGQWGQGTLVTVSSGGSSRSSSSGGGGSGGGGEIVLTQSPATLSLSPGERATLSCRASQSVSSSYLAWYQQKPGQAPRLLIYGASSRATGIPARFSGSGSGTDFTLTISRLEPEDFAVYYCQQDNNLPITFGQGTKVEIK

SEQ ID NO: 5038 - protein, 252 aa, synthetic construct
QVQLVESGGGVVQPGRSLRLSCAASGFTFSSYAMHWVRQAPGKGLEWVAVISYDGSNKYYADSVKGRFTISRDNSKNTLYLQMNSLRAEDTAVYYCARGPYRRSYFSYGMDVWGQWGQGTLVTVSSGGSSRSSSSGGGGSGGGGEIVLTQSPATLSLSPGERATLSCRASQSVSSSYLAWYQQKPGQAPRLLIYGASSRATGIPARFSGSGSGTDFTLTISRLEPEDFAVYYCQQENSPPVTFGQGTKVEIK

SEQ ID NO: 5039 - protein, 250 aa, synthetic construct
QVQLVESGGGVVQPGRSLRLSCAASGFTFSSYAMHWVRQAPGKGLEWVAVISYDGSNKYYADSVKGRFTISRDNSKNTLYLQMNSLRAEDTAVYYCARGRSVYYYQPFDLWGQWGQGTLVTVSSGGSSRSSSSGGGGSGGGGEIVLTQSPATLSLSPGERATLSCRASQSVSSSYLAWYQQKPGQAPRLLIYGASSRATGIPARFSGSGSGTDFTLTISRLEPEDFAVYYCQQYYSTPFTFGQGTKVEIK

SEQ ID NO: 5040 - protein, 254 aa, synthetic construct
QVQLVESGGGVVQPGRSLRLSCAASGFTFSSYAMHWVRQAPGKGLEWVAVISYDGSNKYYADSVKGRFTISRDNSKNTLYLQMNSLRAEDTAVYYCARGTNSYRRLVYDAFDIWGQWGQGTLVTVSSGGSSRSSSSGGGGSGGGGEIVLTQSPATLSLSPGERATLSCRASQSVSSSYLAWYQQKPGQAPRLLIYGASSRATGIPARFSGSGSGTDFTLTISRLEPEDFAVYYCQAWDSSTHRVFGQGTKVEIK

SEQ ID NO: 5041 - protein, 252 aa, synthetic construct
QVQLVESGGGVVQPGRSLRLSCAASGFTFSSYAMHWVRQAPGKGLEWVAVISYDGSNKYYADSVKGRFTISRDNSKNTLYLQMNSLRAEDTAVYYCARGTNSYRRLVYDAFDIWGQWGQGTLVTVSSGGSSRSSSSGGGGSGGGGEIVLTQSPATLSLSPGERATLSCRASQSVSSSYLAWYQQKPGQAPRLLIYGASSRATGIPARFSGSGSGTDFTLTISRLEPEDFAVYYCQQYNTYGTFGQGTKVEIK

SEQ ID NO: 5042 - protein, 255 aa, synthetic construct
QVQLVESGGGVVQPGRSLRLSCAASGFTFSSYAMHWVRQAPGKGLEWVAVISYDGSNKYYADSVKGRFTISRDNSKNTLYLQMNSLRAEDTAVYYCARGTNSYRRLVYDAFDIWGQWGQGTLVTVSSGGSSRSSSSGGGGSGGGGEIVLTQSPATLSLSPGERATLSCRASQSVSSSYLAWYQQKPGQAPRLLIYGASSRATGIPARFSGSGSGTDFTLTISRLEPEDFAVYYCSSYISGTTHVIFGQGTKVEIK

SEQ ID NO: 5043 - protein, 249 aa, synthetic construct
QVQLVESGGGVVQPGRSLRLSCAASGFTFSSYAMHWVRQAPGKGLEWVAVISYDGSNKYYADSVKGRFTISRDNSKNTLYLQMNSLRAEDTAVYYCARGVGARSSNLDYWGQWGQGTLVTVSSGGSSRSSSSGGGGSGGGGEIVLTQSPATLSLSPGERATLSCRASQSVSSSYLAWYQQKPGQAPRLLIYGASSRATGIPARFSGSGSGTDFTLTISRLEPEDFAVYYCRQGAHWPWAFGQGTKVEIK

SEQ ID NO: 5044 - protein, 256 aa, synthetic construct
QVQLVESGGGVVQPGRSLRLSCAASGFTFSSYAMHWVRQAPGKGLEWVAVISYDGSNKYYADSVKGRFTISRDNSKNTLYLQMNSLRAEDTAVYYCARHAADYSFSYPYASYMDPWGQWGQGTLVTVSSGGSSRSSSSGGGGSGGGGEIVLTQSPATLSLSPGERATLSCRASQSVSSSYLAWYQQKPGQAPRLLIYGASSRATGIPARFSGSGSGTDFTLTISRLEPEDFAVYYCQAWDSSSIVVFGQGTKVEIK

SEQ ID NO: 5045 - protein, 257 aa, synthetic construct
QVQLVESGGGVVQPGRSLRLSCAASGFTFSSYAMHWVRQAPGKGLEWVAVISYDGSNKYYADSVKGRFTISRDNSKNTLYLQMNSLRAEDTAVYYCARHGDYYDSSGRVGYYGAFDIWGQWGQGTLVTVSSGGSSRSSSSGGGGSGGGGEIVLTQSPATLSLSPGERATLSCRASQSVSSSYLAWYQQKPGQAPRLLIYGASSRATGIPARFSGSGSGTDFTLTISRLEPEDFAVYYCQQANSPPITFGQGTKVEIK

SEQ ID NO: 5046 - protein, 249 aa, synthetic construct
QVQLVESGGGVVQPGRSLRLSCAASGFTFSSYAMHWVRQAPGKGLEWVAVISYDGSNKYYADSVKGRFTISRDNSKNTLYLQMNSLRAEDTAVYYCARHGIALPTAMDYWGQWGQGTLVTVSSGGSSRSSSSGGGGSGGGGEIVLTQSPATLSLSPGERATLSCRASQSVSSSYLAWYQQKPGQAPRLLIYGASSRATGIPARFSGSGSGTDFTLTISRLEPEDFAVYYCQQYDNPPVTFGQGTKVEIK

SEQ ID NO: 5047 - protein, 252 aa, synthetic construct
QVQLVESGGGVVQPGRSLRLSCAASGFTFSSYAMHWVRQAPGKGLEWVAVISYDGSNKYYADSVKGRFTISRDNSKNTLYLQMNSLRAEDTAVYYCARHGVSGSSYGAFDIWGQWGQGTLVTVSSGGSSRSSSSGGGGSGGGGEIVLTQSPATLSLSPGERATLSCRASQSVSSSYLAWYQQKPGQAPRLLIYGASSRATGIPARFSGSGSGTDFTLTISRLEPEDFAVYYCQAWDSSSIVVFGQGTKVEIK

SEQ ID NO: 5048 - protein, 252 aa, synthetic construct
QVQLVESGGGVVQPGRSLRLSCAASGFTFSSYAMHWVRQAPGKGLEWVAVISYDGSNKYYADSVKGRFTISRDNSKNTLYLQMNSLRAEDTAVYYCARHHYRSSTRSHGFDIWGQWGQGTLVTVSSGGSSRSSSSGGGGSGGGGEIVLTQSPATLSLSPGERATLSCRASQSVSSSYLAWYQQKPGQAPRLLIYGASSRATGIPARFSGSGSGTDFTLTISRLEPEDFAVYYCQQSDNNPITFGQGTKVEIK

SEQ ID NO: 5049 - protein, 248 aa, synthetic construct
QVQLVESGGGVVQPGRSLRLSCAASGFTFSSYAMHWVRQAPGKGLEWVAVISYDGSNKYYADSVKGRFTISRDNSKNTLYLQMNSLRAEDTAVYYCARHHYYGSGFDYWGQWGQGTLVTVSSGGSSRSSSSGGGGSGGGGEIVLTQSPATLSLSPGERATLSCRASQSVSSSYLAWYQQKPGQAPRLLIYGASSRATGIPARFSGSGSGTDFTLTISRLEPEDFAVYYCQQYDNPPVSFGQGTKVEIK

SEQ ID NO: 5050 - protein, 249 aa, synthetic construct
QVQLVESGGGVVQPGRSLRLSCAASGFTFSSYAMHWVRQAPGKGLEWVAVISYDGSNKYYADSVKGRFTISRDNSKNTLYLQMNSLRAEDTAVYYCARHIRGGMNVWGQWGQGTLVTVSSGGSSRSSSSGGGGSGGGGEIVLTQSPATLSLSPGERATLSCRASQSVSSSYLAWYQQKPGQAPRLLIYGASSRATGIPARFSGSGSGTDFTLTISRLEPEDFAVYYCGTWDSSSSPGGVFGQGTKVEIK

SEQ ID NO: 5051 - protein, 256 aa, synthetic construct
QVQLVESGGGVVQPGRSLRLSCAASGFTFSSYAMHWVRQAPGKGLEWVAVISYDGSNKYYADSVKGRFTISRDNSKNTLYLQMNSLRAEDTAVYYCARHQTDRLSSGYYYPVYMDLWGQWGQGTLVTVSSGGSSRSSSSGGGGSGGGGEIVLTQSPATLSLSPGERATLSCRASQSVSSSYLAWYQQKPGQAPRLLIYGASSRATGIPARFSGSGSGTDFTLTISRLEPEDFAVYYCQTWDSSTGVFGQGTKVEIK

SEQ ID NO: 5052 - protein, 250 aa, synthetic construct
QVQLVESGGGVVQPGRSLRLSCAASGFTFSSYAMHWVRQAPGKGLEWVAVISYDGSNKYYADSVKGRFTISRDNSKNTLYLQMNSLRAEDTAVYYCARHRGGGYGHYMDVWGQWGQGTLVTVSSGGSSRSSSSGGGGSGGGGEIVLTQSPATLSLSPGERATLSCRASQSVSSSYLAWYQQKPGQAPRLLIYGASSRATGIPARFSGSGSGTDFTLTISRLEPEDFAVYYCQTWDSSTAVFGQGTKVEIK

SEQ ID NO: 5053 - protein, 252 aa, synthetic construct
QVQLVESGGGVVQPGRSLRLSCAASGFTFSSYAMHWVRQAPGKGLEWVAVISYDGSNKYYADSVKGRFTISRDNSKNTLYLQMNSLRAEDTAVYYCARHVTLSSWYSIDYWGQWGQGTLVTVSSGGSSRSSSSGGGGSGGGGEIVLTQSPATLSLSPGERATLSCRASQSVSSSYLAWYQQKPGQAPRLLIYGASSRATGIPARFSGSGSGTDFTLTISRLEPEDFAVYYCGTWDSSALLEVFGQGTKVEIK

SEQ ID NO: 5054 - protein, 250 aa, synthetic construct
QVQLVESGGGVVQPGRSLRLSCAASGFTFSSYAMHWVRQAPGKGLEWVAVISYDGSNKYYADSVKGRFTISRDNSKNTLYLQMNSLRAEDTAVYYCARHYSSSPAGDFWGQWGQGTLVTVSSGGSSRSSSSGGGGSGGGGEIVLTQSPATLSLSPGERATLSCRASQSVSSSYLAWYQQKPGQAPRLLIYGASSRATGIPARFSGSGSGTDFTLTISRLEPEDFAVYYCATWDDSLNGPVFGQGTKVEIK

SEQ ID NO: 5055 - protein, 253 aa, synthetic construct
QVQLVESGGGVVQPGRSLRLSCAASGFTFSSYAMHWVRQAPGKGLEWVAVISYDGSNKYYADSVKGRFTISRDNSKNTLYLQMNSLRAEDTAVYYCARHYSVMWDKPVYMDYWGQWGQGTLVTVSSGGSSRSSSSGGGGSGGGGEIVLTQSPATLSLSPGERATLSCRASQSVSSSYLAWYQQKPGQAPRLLIYGASSRATGIPARFSGSGSGTDFTLTISRLEPEDFAVYYCQTWDSTTHVVFGQGTKVEIK

SEQ ID NO: 5056 - protein, 249 aa, synthetic construct
QVQLVESGGGVVQPGRSLRLSCAASGFTFSSYAMHWVRQAPGKGLEWVAVISYDGSNKYYADSVKGRFTISRDNSKNTLYLQMNSLRAEDTAVYYCARIRYWSYQDPWGQWGQGTLVTVSSGGSSRSSSSGGGGSGGGGEIVLTQSPATLSLSPGERATLSCRASQSVSSSYLAWYQQKPGQAPRLLIYGASSRATGIPARFSGSGSGTDFTLTISRLEPEDFAVYYCQVWDYSRNNWVFGQGTKVEIK

SEQ ID NO: 5057 - protein, 250 aa, synthetic construct
QVQLVESGGGVVQPGRSLRLSCAASGFTFSSYAMHWVRQAPGKGLEWVAVISYDGSNKYYADSVKGRFTISRDNSKNTLYLQMNSLRAEDTAVYYCARKFVGASSTFDSWGQWGQGTLVTVSSGGSSRSSSSGGGGSGGGGEIVLTQSPATLSLSPGERATLSCRASQSVSSSYLAWYQQKPGQAPRLLIYGASSRATGIPARFSGSGSGTDFTLTISRLEPEDFAVYYCQQSYSTPPWTFGQGTKVEIK

SEQ ID NO: 5058 - protein, 254 aa, synthetic construct
QVQLVESGGGVVQPGRSLRLSCAASGFTFSSYAMHWVRQAPGKGLEWVAVISYDGSNKYYADSVKGRFTISRDNSKNTLYLQMNSLRAEDTAVYYCARLGGRDGYFIRKGAFDIWGQWGQGTLVTVSSGGSSRSSSSGGGGSGGGGEIVLTQSPATLSLSPGERATLSCRASQSVSSSYLAWYQQKPGQAPRLLIYGASSRATGIPARFSGSGSGTDFTLTISRLEPEDFAVYYCQHYNNWPPTFGQGTKVEIK

SEQ ID NO: 5059 - protein, 252 aa, synthetic construct
QVQLVESGGGVVQPGRSLRLSCAASGFTFSSYAMHWVRQAPGKGLEWVAVISYDGSNKYYADSVKGRFTISRDNSKNTLYLQMNSLRAEDTAVYYCARLGSWYAGYGAMDYWGQWGQGTLVTVSSGGSSRSSSSGGGGSGGGGEIVLTQSPATLSLSPGERATLSCRASQSVSSSYLAWYQQKPGQAPRLLIYGASSRATGIPARFSGSGSGTDFTLTISRLEPEDFAVYYCQAWDSSAAVVFGQGTKVEIK

SEQ ID NO: 5060 - protein, 249 aa, synthetic construct
QVQLVESGGGVVQPGRSLRLSCAASGFTFSSYAMHWVRQAPGKGLEWVAVISYDGSNKYYADSVKGRFTISRDNSKNTLYLQMNSLRAEDTAVYYCARLLSTSNWFDPWGQWGQGTLVTVSSGGSSRSSSSGGGGSGGGGEIVLTQSPATLSLSPGERATLSCRASQSVSSSYLAWYQQKPGQAPRLLIYGASSRATGIPARFSGSGSGTDFTLTISRLEPEDFAVYYCSSFGGNNNWIFGQGTKVEIK

SEQ ID NO: 5061 - protein, 251 aa, synthetic construct
QVQLVESGGGVVQPGRSLRLSCAASGFTFSSYAMHWVRQAPGKGLEWVAVISYDGSNKYYADSVKGRFTISRDNSKNTLYLQMNSLRAEDTAVYYCARLLWSRTGHRFDSWGQWGQGTLVTVSSGGSSRSSSSGGGGSGGGGEIVLTQSPATLSLSPGERATLSCRASQSVSSSYLAWYQQKPGQAPRLLIYGASSRATGIPARFSGSGSGTDFTLTISRLEPEDFAVYYCQQRSNPPGYTFGQGTKVEIK

SEQ ID NO: 5062 - protein, 252 aa, synthetic construct
QVQLVESGGGVVQPGRSLRLSCAASGFTFSSYAMHWVRQAPGKGLEWVAVISYDGSNKYYADSVKGRFTISRDNSKNTLYLQMNSLRAEDTAVYYCARLRGSYYRNWFDPWGQWGQGTLVTVSSGGSSRSSSSGGGGSGGGGEIVLTQSPATLSLSPGERATLSCRASQSVSSSYLAWYQQKPGQAPRLLIYGASSRATGIPARFSGSGSGTDFTLTISRLEPEDFAVYYCGTWDSSGLPYVFGQGTKVEIK

SEQ ID NO: 5063 - protein, 259 aa, synthetic construct
QVQLVESGGGVVQPGRSLRLSCAASGFTFSSYAMHWVRQAPGKGLEWVAVISYDGSNKYYADSVKGRFTISRDNSKNTLYLQMNSLRAEDTAVYYCARLTRAQQSSSAYRLRSSYYMDPWGQWGQGTLVTVSSGGSSRSSSSGGGGSGGGGEIVLTQSPATLSLSPGERATLSCRASQSVSSSYLAWYQQKPGQAPRLLIYGASSRATGIPARFSGSGSGTDFTLTISRLEPEDFAVYYCQQLDRYPPTFGQGTKVEIK

SEQ ID NO: 5064 - protein, 248 aa, synthetic construct
QVQLVESGGGVVQPGRSLRLSCAASGFTFSSYAMHWVRQAPGKGLEWVAVISYDGSNKYYADSVKGRFTISRDNSKNTLYLQMNSLRAEDTAVYYCARLTSDHSYYWGQWGQGTLVTVSSGGSSRSSSSGGGGSGGGGEIVLTQSPATLSLSPGERATLSCRASQSVSSSYLAWYQQKPGQAPRLLIYGASSRATGIPARFSGSGSGTDFTLTISRLEPEDFAVYYCQVWHSGDNRWVFGQGTKVEIK

SEQ ID NO: 5065 - protein, 260 aa, synthetic construct
QVQLVESGGGVVQPGRSLRLSCAASGFTFSSYAMHWVRQAPGKGLEWVAVISYDGSNKYYADSVKGRFTISRDNSKNTLYLQMNSLRAEDTAVYYCARMDRVGSRGYTYYSTLGSYAMDIWGQWGQGTLVTVSSGGSSRSSSSGGGGSGGGGEIVLTQSPATLSLSPGERATLSCRASQSVSSSYLAWYQQKPGQAPRLLIYGASSRATGIPARFSGSGSGTDFTLTISRLEPEDFAVYYCQQAYSPPITFGQGTKVEIK

SEQ ID NO: 5066 - protein, 250 aa, synthetic construct
QVQLVESGGGVVQPGRSLRLSCAASGFTFSSYAMHWVRQAPGKGLEWVAVISYDGSNKYYADSVKGRFTISRDNSKNTLYLQMNSLRAEDTAVYYCARMGGGNDSGAFDYWGQWGQGTLVTVSSGGSSRSSSSGGGGSGGGGEIVLTQSPATLSLSPGERATLSCRASQSVSSSYLAWYQQKPGQAPRLLIYGASSRATGIPARFSGSGSGTDFTLTISRLEPEDFAVYYCQQYDSPPVTFGQGTKVEIK

SEQ ID NO: 5067 - protein, 255 aa, synthetic construct
QVQLVESGGGVVQPGRSLRLSCAASGFTFSSYAMHWVRQAPGKGLEWVAVISYDGSNKYYADSVKGRFTISRDNSKNTLYLQMNSLRAEDTAVYYCARMGQHSYGKNSFAVYMDVWGQWGQGTLVTVSSGGSSRSSSSGGGGSGGGGEIVLTQSPATLSLSPGERATLSCRASQSVSSSYLAWYQQKPGQAPRLLIYGASSRATGIPARFSGSGSGTDFTLTISRLEPEDFAVYYCQQFDDLPITFGQGTKVEIK

SEQ ID NO: 5068 - protein, 250 aa, synthetic construct
QVQLVESGGGVVQPGRSLRLSCAASGFTFSSYAMHWVRQAPGKGLEWVAVISYDGSNKYYADSVKGRFTISRDNSKNTLYLQMNSLRAEDTAVYYCARMKTRKDWFDPWGQWGQGTLVTVSSGGSSRSSSSGGGGSGGGGEIVLTQSPATLSLSPGERATLSCRASQSVSSSYLAWYQQKPGQAPRLLIYGASSRATGIPARFSGSGSGTDFTLTISRLEPEDFAVYYCGTWDSSLPSVVFGQGTKVEIK

SEQ ID NO: 5069 - protein, 248 aa, synthetic construct
QVQLVESGGGVVQPGRSLRLSCAASGFTFSSYAMHWVRQAPGKGLEWVAVISYDGSNKYYADSVKGRFTISRDNSKNTLYLQMNSLRAEDTAVYYCARMQRYGMDVWGQWGQGTLVTVSSGGSSRSSSSGGGGSGGGGEIVLTQSPATLSLSPGERATLSCRASQSVSSSYLAWYQQKPGQAPRLLIYGASSRATGIPARFSGSGSGTDFTLTISRLEPEDFAVYYCASYSTGSTLYVFGQGTKVEIK

SEQ ID NO: 5070 - protein, 246 aa, synthetic construct
QVQLVESGGGVVQPGRSLRLSCAASGFTFSSYAMHWVRQAPGKGLEWVAVISYDGSNKYYADSVKGRFTISRDNSKNTLYLQMNSLRAEDTAVYYCARMQRYGMDVWGQWGQGTLVTVSSGGSSRSSSSGGGGSGGGGEIVLTQSPATLSLSPGERATLSCRASQSVSSSYLAWYQQKPGQAPRLLIYGASSRATGIPARFSGSGSGTDFTLTISRLEPEDFAVYYCQTWDSFGQVFGQGTKVEIK

SEQ ID NO: 5071 - protein, 249 aa, synthetic construct
QVQLVESGGGVVQPGRSLRLSCAASGFTFSSYAMHWVRQAPGKGLEWVAVISYDGSNKYYADSVKGRFTISRDNSKNTLYLQMNSLRAEDTAVYYCARNGRTVTKGMDVWGQWGQGTLVTVSSGGSSRSSSSGGGGSGGGGEIVLTQSPATLSLSPGERATLSCRASQSVSSSYLAWYQQKPGQAPRLLIYGASSRATGIPARFSGSGSGTDFTLTISRLEPEDFAVYYCQQSYSPPPTFGQGTKVEIK

SEQ ID NO: 5072 - protein, 246 aa, synthetic construct
QVQLVESGGGVVQPGRSLRLSCAASGFTFSSYAMHWVRQAPGKGLEWVAVISYDGSNKYYADSVKGRFTISRDNSKNTLYLQMNSLRAEDTAVYYCARNGSLGFDYWGQWGQGTLVTVSSGGSSRSSSSGGGGSGGGGEIVLTQSPATLSLSPGERATLSCRASQSVSSSYLAWYQQKPGQAPRLLIYGASSRATGIPARFSGSGSGTDFTLTISRLEPEDFAVYYCQQAYSPPITFGQGTKVEIK

SEQ ID NO: 5073 - protein, 248 aa, synthetic construct
QVQLVESGGGVVQPGRSLRLSCAASGFTFSSYAMHWVRQAPGKGLEWVAVISYDGSNKYYADSVKGRFTISRDNSKNTLYLQMNSLRAEDTAVYYCARNRGWTGSFDYWGQWGQGTLVTVSSGGSSRSSSSGGGGSGGGGEIVLTQSPATLSLSPGERATLSCRASQSVSSSYLAWYQQKPGQAPRLLIYGASSRATGIPARFSGSGSGTDFTLTISRLEPEDFAVYYCQQANSFPPTFGQGTKVEIK

SEQ ID NO: 5074 - protein, 249 aa, synthetic construct
QVQLVESGGGVVQPGRSLRLSCAASGFTFSSYAMHWVRQAPGKGLEWVAVISYDGSNKYYADSVKGRFTISRDNSKNTLYLQMNSLRAEDTAVYYCARNRNYSAGFDYWGQWGQGTLVTVSSGGSSRSSSSGGGGSGGGGEIVLTQSPATLSLSPGERATLSCRASQSVSSSYLAWYQQKPGQAPRLLIYGASSRATGIPARFSGSGSGTDFTLTISRLEPEDFAVYYCQQYGSSPMITFGQGTKVEIK

SEQ ID NO: 5075 - protein, 250 aa, synthetic construct
QVQLVESGGGVVQPGRSLRLSCAASGFTFSSYAMHWVRQAPGKGLEWVAVISYDGSNKYYADSVKGRFTISRDNSKNTLYLQMNSLRAEDTAVYYCARNRVPKYPMDVWGQWGQGTLVTVSSGGSSRSSSSGGGGSGGGGEIVLTQSPATLSLSPGERATLSCRASQSVSSSYLAWYQQKPGQAPRLLIYGASSRATGIPARFSGSGSGTDFTLTISRLEPEDFAVYYCQMWDSSSDHSVFGQGTKVEIK

SEQ ID NO: 5076 - protein, 250 aa, synthetic construct
QVQLVESGGGVVQPGRSLRLSCAASGFTFSSYAMHWVRQAPGKGLEWVAVISYDGSNKYYADSVKGRFTISRDNSKNTLYLQMNSLRAEDTAVYYCARNRVPKYPMDVWGQWGQGTLVTVSSGGSSRSSSSGGGGSGGGGEIVLTQSPATLSLSPGERATLSCRASQSVSSSYLAWYQQKPGQAPRLLIYGASSRATGIPARFSGSGSGTDFTLTISRLEPEDFAVYYCQVWDSSSDHVVFGQGTKVEIK

SEQ ID NO: 5077 - protein, 257 aa, synthetic construct
QVQLVESGGGVVQPGRSLRLSCAASGFTFSSYAMHWVRQAPGKGLEWVAVISYDGSNKYYADSVKGRFTISRDNSKNTLYLQMNSLRAEDTAVYYCARQYISGGYSYSSRLSYGMDPWGQWGQGTLVTVSSGGSSRSSSSGGGGSGGGGEIVLTQSPATLSLSPGERATLSCRASQSVSSSYLAWYQQKPGQAPRLLIYGASSRATGIPARFSGSGSGTDFTLTISRLEPEDFAVYYCQQANSPPITFGQGTKVEIK

SEQ ID NO: 5078 - protein, 257 aa, synthetic construct
QVQLVESGGGVVQPGRSLRLSCAASGFTFSSYAMHWVRQAPGKGLEWVAVISYDGSNKYYADSVKGRFTISRDNSKNTLYLQMNSLRAEDTAVYYCARQYISGGYSYSSRLSYGMDPWGQWGQGTLVTVSSGGSSRSSSSGGGGSGGGGEIVLTQSPATLSLSPGERATLSCRASQSVSSSYLAWYQQKPGQAPRLLIYGASSRATGIPARFSGSGSGTDFTLTISRLEPEDFAVYYCQQSYSPPVTFGQGTKVEIK

SEQ ID NO: 5079 - protein, 252 aa, synthetic construct
QVQLVESGGGVVQPGRSLRLSCAASGFTFSSYAMHWVRQAPGKGLEWVAVISYDGSNKYYADSVKGRFTISRDNSKNTLYLQMNSLRAEDTAVYYCARRLVSSDSPYFDYWGQWGQGTLVTVSSGGSSRSSSSGGGGSGGGGEIVLTQSPATLSLSPGERATLSCRASQSVSSSYLAWYQQKPGQAPRLLIYGASSRATGIPARFSGSGSGTDFTLTISRLEPEDFAVYYCQAWDSSSSTRVFGQGTKVEIK

SEQ ID NO: 5080 - protein, 253 aa, synthetic construct
QVQLVESGGGVVQPGRSLRLSCAASGFTFSSYAMHWVRQAPGKGLEWVAVISYDGSNKYYADSVKGRFTISRDNSKNTLYLQMNSLRAEDTAVYYCARRPARSSQGRPIDYWGQWGQGTLVTVSSGGSSRSSSSGGGGSGGGGEIVLTQSPATLSLSPGERATLSCRASQSVSSSYLAWYQQKPGQAPRLLIYGASSRATGIPARFSGSGSGTDFTLTISRLEPEDFAVYYCQVWDSSSDHWVFGQGTKVEIK

SEQ ID NO: 5081 - protein, 247 aa, synthetic construct
QVQLVESGGGVVQPGRSLRLSCAASGFTFSSYAMHWVRQAPGKGLEWVAVISYDGSNKYYADSVKGRFTISRDNSKNTLYLQMNSLRAEDTAVYYCARSGQYAGLDYWGQWGQGTLVTVSSGGSSRSSSSGGGGSGGGGEIVLTQSPATLSLSPGERATLSCRASQSVSSSYLAWYQQKPGQAPRLLIYGASSRATGIPARFSGSGSGTDFTLTISRLEPEDFAVYYCQQANSFPLTFGQGTKVEIK

SEQ ID NO: 5082 - protein, 247 aa, synthetic construct
QVQLVESGGGVVQPGRSLRLSCAASGFTFSSYAMHWVRQAPGKGLEWVAVISYDGSNKYYADSVKGRFTISRDNSKNTLYLQMNSLRAEDTAVYYCARSLNGGAGDYWGQWGQGTLVTVSSGGSSRSSSSGGGGSGGGGEIVLTQSPATLSLSPGERATLSCRASQSVSSSYLAWYQQKPGQAPRLLIYGASSRATGIPARFSGSGSGTDFTLTISRLEPEDFAVYYCQQAYSPPITFGQGTKVEIK

SEQ ID NO: 5083 - protein, 250 aa, synthetic construct
QVQLVESGGGVVQPGRSLRLSCAASGFTFSSYAMHWVRQAPGKGLEWVAVISYDGSNKYYADSVKGRFTISRDNSKNTLYLQMNSLRAEDTAVYYCARSPRPHGGPYLDYWGQWGQGTLVTVSSGGSSRSSSSGGGGSGGGGEIVLTQSPATLSLSPGERATLSCRASQSVSSSYLAWYQQKPGQAPRLLIYGASSRATGIPARFSGSGSGTDFTLTISRLEPEDFAVYYCQQSYSTPWTFGQGTKVEIK

SEQ ID NO: 5084 - protein, 248 aa, synthetic construct
QVQLVESGGGVVQPGRSLRLSCAASGFTFSSYAMHWVRQAPGKGLEWVAVISYDGSNKYYADSVKGRFTISRDNSKNTLYLQMNSLRAEDTAVYYCARSSGSYRPFDSWGQWGQGTLVTVSSGGSSRSSSSGGGGSGGGGEIVLTQSPATLSLSPGERATLSCRASQSVSSSYLAWYQQKPGQAPRLLIYGASSRATGIPARFSGSGSGTDFTLTISRLEPEDFAVYYCQQYYDWPPTFGQGTKVEIK

SEQ ID NO: 5085 - protein, 249 aa, synthetic construct
QVQLVESGGGVVQPGRSLRLSCAASGFTFSSYAMHWVRQAPGKGLEWVAVISYDGSNKYYADSVKGRFTISRDNSKNTLYLQMNSLRAEDTAVYYCARSSGSYRPFDSWGQWGQGTLVTVSSGGSSRSSSSGGGGSGGGGEIVLTQSPATLSLSPGERATLSCRASQSVSSSYLAWYQQKPGQAPRLLIYGASSRATGIPARFSGSGSGTDFTLTISRLEPEDFAVYYCQQYYSTPPYTFGQGTKVEIK

SEQ ID NO: 5086 - protein, 260 aa, synthetic construct
QVQLVESGGGVVQPGRSLRLSCAASGFTFSSYAMHWVRQAPGKGLEWVAVISYDGSNKYYADSVKGRFTISRDNSKNTLYLQMNSLRAEDTAVYYCARSYVYRIGTWSYDVYLGDVWGQWGQGTLVTVSSGGSSRSSSSGGGGSGGGGEIVLTQSPATLSLSPGERATLSCRASQSVSSSYLAWYQQKPGQAPRLLIYGASSRATGIPARFSGSGSGTDFTLTISRLEPEDFAVYYCQVWDSSSSDQNYVFGQGTKVEIK

SEQ ID NO: 5087 - protein, 249 aa, synthetic construct
QVQLVESGGGVVQPGRSLRLSCAASGFTFSSYAMHWVRQAPGKGLEWVAVISYDGSNKYYADSVKGRFTISRDNSKNTLYLQMNSLRAEDTAVYYCARTRYPYSMDVWGQWGQGTLVTVSSGGSSRSSSSGGGGSGGGGEIVLTQSPATLSLSPGERATLSCRASQSVSSSYLAWYQQKPGQAPRLLIYGASSRATGIPARFSGSGSGTDFTLTISRLEPEDFAVYYCGTWDSSLRSGFFGQGTKVEIK

SEQ ID NO: 5088 - protein, 252 aa, synthetic construct
QVQLVESGGGVVQPGRSLRLSCAASGFTFSSYAMHWVRQAPGKGLEWVAVISYDGSNKYYADSVKGRFTISRDNSKNTLYLQMNSLRAEDTAVYYCARTSSGSTAAPIGYWGQWGQGTLVTVSSGGSSRSSSSGGGGSGGGGEIVLTQSPATLSLSPGERATLSCRASQSVSSSYLAWYQQKPGQAPRLLIYGASSRATGIPARFSGSGSGTDFTLTISRLEPEDFAVYYCEAWDDNLSRRVFGQGTKVEIK

SEQ ID NO: 5089 - protein, 249 aa, synthetic construct
QVQLVESGGGVVQPGRSLRLSCAASGFTFSSYAMHWVRQAPGKGLEWVAVISYDGSNKYYADSVKGRFTISRDNSKNTLYLQMNSLRAEDTAVYYCARVARGGYKTADLWGQWGQGTLVTVSSGGSSRSSSSGGGGSGGGGEIVLTQSPATLSLSPGERATLSCRASQSVSSSYLAWYQQKPGQAPRLLIYGASSRATGIPARFSGSGSGTDFTLTISRLEPEDFAVYYCLQGDGLPRTFGQGTKVEIK

SEQ ID NO: 5090 - protein, 250 aa, synthetic construct
QVQLVESGGGVVQPGRSLRLSCAASGFTFSSYAMHWVRQAPGKGLEWVAVISYDGSNKYYADSVKGRFTISRDNSKNTLYLQMNSLRAEDTAVYYCARVASSSAGGVDYWGQWGQGTLVTVSSGGSSRSSSSGGGGSGGGGEIVLTQSPATLSLSPGERATLSCRASQSVSSSYLAWYQQKPGQAPRLLIYGASSRATGIPARFSGSGSGTDFTLTISRLEPEDFAVYYCQQYNNWPALTFGQGTKVEIK

SEQ ID NO: 5091 - protein, 249 aa, synthetic construct
QVQLVESGGGVVQPGRSLRLSCAASGFTFSSYAMHWVRQAPGKGLEWVAVISYDGSNKYYADSVKGRFTISRDNSKNTLYLQMNSLRAEDTAVYYCARVGYGDYGGIDYWGQWGQGTLVTVSSGGSSRSSSSGGGGSGGGGEIVLTQSPATLSLSPGERATLSCRASQSVSSSYLAWYQQKPGQAPRLLIYGASSRATGIPARFSGSGSGTDFTLTISRLEPEDFAVYYCSSYTSSALEFGQGTKVEIK

SEQ ID NO: 5092 - protein, 249 aa, synthetic construct
QVQLVESGGGVVQPGRSLRLSCAASGFTFSSYAMHWVRQAPGKGLEWVAVISYDGSNKYYADSVKGRFTISRDNSKNTLYLQMNSLRAEDTAVYYCARVNYRYLAGFDPWGQWGQGTLVTVSSGGSSRSSSSGGGGSGGGGEIVLTQSPATLSLSPGERATLSCRASQSVSSSYLAWYQQKPGQAPRLLIYGASSRATGIPARFSGSGSGTDFTLTISRLEPEDFAVYYCQQTNSFPPTFGQGTKVEIK

SEQ ID NO: 5093 - protein, 247 aa, synthetic construct
QVQLVESGGGVVQPGRSLRLSCAASGFTFSSYAMHWVRQAPGKGLEWVAVISYDGSNKYYADSVKGRFTISRDNSKNTLYLQMNSLRAEDTAVYYCARVPRDLDYWGQWGQGTLVTVSSGGSSRSSSSGGGGSGGGGEIVLTQSPATLSLSPGERATLSCRASQSVSSSYLAWYQQKPGQAPRLLIYGASSRATGIPARFSGSGSGTDFTLTISRLEPEDFAVYYCQVWDSSISHWVFGQGTKVEIK

SEQ ID NO: 5094 - protein, 247 aa, synthetic construct
QVQLVESGGGVVQPGRSLRLSCAASGFTFSSYAMHWVRQAPGKGLEWVAVISYDGSNKYYADSVKGRFTISRDNSKNTLYLQMNSLRAEDTAVYYCARVPRDLDYWGQWGQGTLVTVSSGGSSRSSSSGGGGSGGGGEIVLTQSPATLSLSPGERATLSCRASQSVSSSYLAWYQQKPGQAPRLLIYGASSRATGIPARFSGSGSGTDFTLTISRLEPEDFAVYYCQVWDSSSDHWVFGQGTKVEIK

SEQ ID NO: 5095 - protein, 250 aa, synthetic construct
QVQLVESGGGVVQPGRSLRLSCAASGFTFSSYAMHWVRQAPGKGLEWVAVISYDGSNKYYADSVKGRFTISRDNSKNTLYLQMNSLRAEDTAVYYCARVPRGGDKFDPWGQWGQGTLVTVSSGGSSRSSSSGGGGSGGGGEIVLTQSPATLSLSPGERATLSCRASQSVSSSYLAWYQQKPGQAPRLLIYGASSRATGIPARFSGSGSGTDFTLTISRLEPEDFAVYYCQVWHSGDNRWVFGQGTKVEIK

SEQ ID NO: 5096 - protein, 246 aa, synthetic construct
QVQLVESGGGVVQPGRSLRLSCAASGFTFSSYAMHWVRQAPGKGLEWVAVISYDGSNKYYADSVKGRFTISRDNSKNTLYLQMNSLRAEDTAVYYCARVRGGWSDYWGQWGQGTLVTVSSGGSSRSSSSGGGGSGGGGEIVLTQSPATLSLSPGERATLSCRASQSVSSSYLAWYQQKPGQAPRLLIYGASSRATGIPARFSGSGSGTDFTLTISRLEPEDFAVYYCQQAYSPPITFGQGTKVEIK

SEQ ID NO: 5097 - protein, 250 aa, synthetic construct
QVQLVESGGGVVQPGRSLRLSCAASGFTFSSYAMHWVRQAPGKGLEWVAVISYDGSNKYYADSVKGRFTISRDNSKNTLYLQMNSLRAEDTAVYYCARVSHGYRSMDNWGQWGQGTLVTVSSGGSSRSSSSGGGGSGGGGEIVLTQSPATLSLSPGERATLSCRASQSVSSSYLAWYQQKPGQAPRLLIYGASSRATGIPARFSGSGSGTDFTLTISRLEPEDFAVYYCQQRSNGWPPWTFGQGTKVEIK

SEQ ID NO: 5098 - protein, 253 aa, synthetic construct
QVQLVESGGGVVQPGRSLRLSCAASGFTFSSYAMHWVRQAPGKGLEWVAVISYDGSNKYYADSVKGRFTISRDNSKNTLYLQMNSLRAEDTAVYYCARYRRRGDLTRRYPFDIWGQWGQGTLVTVSSGGSSRSSSSGGGGSGGGGEIVLTQSPATLSLSPGERATLSCRASQSVSSSYLAWYQQKPGQAPRLLIYGASSRATGIPARFSGSGSGTDFTLTISRLEPEDFAVYYCQTSGTGIPVFGQGTKVEIK

SEQ ID NO: 5099 - protein, 249 aa, synthetic construct
QVQLVESGGGVVQPGRSLRLSCAASGFTFSSYAMHWVRQAPGKGLEWVAVISYDGSNKYYADSVKGRFTISRDNSKNTLYLQMNSLRAEDTAVYYCARYYDPTGYLTDYWGQWGQGTLVTVSSGGSSRSSSSGGGGSGGGGEIVLTQSPATLSLSPGERATLSCRASQSVSSSYLAWYQQKPGQAPRLLIYGASSRATGIPARFSGSGSGTDFTLTISRLEPEDFAVYYCQQYNSTPLTFGQGTKVEIK

SEQ ID NO: 5100 - protein, 249 aa, synthetic construct
QVQLVESGGGVVQPGRSLRLSCAASGFTFSSYAMHWVRQAPGKGLEWVAVISYDGSNKYYADSVKGRFTISRDNSKNTLYLQMNSLRAEDTAVYYCASDGAKYYLSYWGQWGQGTLVTVSSGGSSRSSSSGGGGSGGGGEIVLTQSPATLSLSPGERATLSCRASQSVSSSYLAWYQQKPGQAPRLLIYGASSRATGIPARFSGSGSGTDFTLTISRLEPEDFAVYYCSSYTSSSTLVVFGQGTKVEIK

SEQ ID NO: 5101 - protein, 249 aa, synthetic construct
QVQLVESGGGVVQPGRSLRLSCAASGFTFSSYAMHWVRQAPGKGLEWVAVISYDGSNKYYADSVKGRFTISRDNSKNTLYLQMNSLRAEDTAVYYCASGGLYKSGQFDSWGQWGQGTLVTVSSGGSSRSSSSGGGGSGGGGEIVLTQSPATLSLSPGERATLSCRASQSVSSSYLAWYQQKPGQAPRLLIYGASSRATGIPARFSGSGSGTDFTLTISRLEPEDFAVYYCQQYYSIPRTFGQGTKVEIK

SEQ ID NO: 5102 - protein, 251 aa, synthetic construct
QVQLVESGGGVVQPGRSLRLSCAASGFTFSSYAMHWVRQAPGKGLEWVAVISYDGSNKYYADSVKGRFTISRDNSKNTLYLQMNSLRAEDTAVYYCASHDSSGYYDWIDYWGQWGQGTLVTVSSGGSSRSSSSGGGGSGGGGEIVLTQSPATLSLSPGERATLSCRASQSVSSSYLAWYQQKPGQAPRLLIYGASSRATGIPARFSGSGSGTDFTLTISRLEPEDFAVYYCQAWDSSTYTVFGQGTKVEIK

SEQ ID NO: 5103 - protein, 251 aa, synthetic construct
QVQLVESGGGVVQPGRSLRLSCAASGFTFSSYAMHWVRQAPGKGLEWVAVISYDGSNKYYADSVKGRFTISRDNSKNTLYLQMNSLRAEDTAVYYCASHDSSGYYDWIDYWGQWGQGTLVTVSSGGSSRSSSSGGGGSGGGGEIVLTQSPATLSLSPGERATLSCRASQSVSSSYLAWYQQKPGQAPRLLIYGASSRATGIPARFSGSGSGTDFTLTISRLEPEDFAVYYCQIWDSSSYVVFGQGTKVEIK

SEQ ID NO: 5104 - protein, 251 aa, synthetic construct
QVQLVESGGGVVQPGRSLRLSCAASGFTFSSYAMHWVRQAPGKGLEWVAVISYDGSNKYYADSVKGRFTISRDNSKNTLYLQMNSLRAEDTAVYYCASKTPEWEGAPFQWGQWGQGTLVTVSSGGSSRSSSSGGGGSGGGGEIVLTQSPATLSLSPGERATLSCRASQSVSSSYLAWYQQKPGQAPRLLIYGASSRATGIPARFSGSGSGTDFTLTISRLEPEDFAVYYCQVWDYSRNNWVFGQGTKVEIK

SEQ ID NO: 5105 - protein, 249 aa, synthetic construct
QVQLVESGGGVVQPGRSLRLSCAASGFTFSSYAMHWVRQAPGKGLEWVAVISYDGSNKYYADSVKGRFTISRDNSKNTLYLQMNSLRAEDTAVYYCASQYSSGWPPDYWGQWGQGTLVTVSSGGSSRSSSSGGGGSGGGGEIVLTQSPATLSLSPGERATLSCRASQSVSSSYLAWYQQKPGQAPRLLIYGASSRATGIPARFSGSGSGTDFTLTISRLEPEDFAVYYCMQAIPHLRLTFGQGTKVEIK

SEQ ID NO: 5106 - protein, 250 aa, synthetic construct
QVQLVESGGGVVQPGRSLRLSCAASGFTFSSYAMHWVRQAPGKGLEWVAVISYDGSNKYYADSVKGRFTISRDNSKNTLYLQMNSLRAEDTAVYYCASRGRGQQVGKNWGQWGQGTLVTVSSGGSSRSSSSGGGGSGGGGEIVLTQSPATLSLSPGERATLSCRASQSVSSSYLAWYQQKPGQAPRLLIYGASSRATGIPARFSGSGSGTDFTLTISRLEPEDFAVYYCQVWDYSRNNWVFGQGTKVEIK

SEQ ID NO: 5107 - protein, 255 aa, synthetic construct
QVQLVESGGGVVQPGRSLRLSCAASGFTFSSYAMHWVRQAPGKGLEWVAVISYDGSNKYYADSVKGRFTISRDNSKNTLYLQMNSLRAEDTAVYYCASWRKGYYYGRDGYPDNWGQWGQGTLVTVSSGGSSRSSSSGGGGSGGGGEIVLTQSPATLSLSPGERATLSCRASQSVSSSYLAWYQQKPGQAPRLLIYGASSRATGIPARFSGSGSGTDFTLTISRLEPEDFAVYYCQVWHSGDNRWVFGQGTKVEIK

SEQ ID NO: 5108 - protein, 250 aa, synthetic construct
QVQLVESGGGVVQPGRSLRLSCAASGFTFSSYAMHWVRQAPGKGLEWVAVISYDGSNKYYADSVKGRFTISRDNSKNTLYLQMNSLRAEDTAVYYCATEQPNGGWPLDSWGQWGQGTLVTVSSGGSSRSSSSGGGGSGGGGEIVLTQSPATLSLSPGERATLSCRASQSVSSSYLAWYQQKPGQAPRLLIYGASSRATGIPARFSGSGSGTDFTLTISRLEPEDFAVYYCSSYTSSSTLAFGQGTKVEIK

SEQ ID NO: 5109 - protein, 252 aa, synthetic construct
QVQLVESGGGVVQPGRSLRLSCAASGFTFSSYAMHWVRQAPGKGLEWVAVISYDGSNKYYADSVKGRFTISRDNSKNTLYLQMNSLRAEDTAVYYCATGSYRKYAGGFDYWGQWGQGTLVTVSSGGSSRSSSSGGGGSGGGGEIVLTQSPATLSLSPGERATLSCRASQSVSSSYLAWYQQKPGQAPRLLIYGASSRATGIPARFSGSGSGTDFTLTISRLEPEDFAVYYCQVWDSGSDHWVFGQGTKVEIK

SEQ ID NO: 5110 - protein, 252 aa, synthetic construct
QVQLVESGGGVVQPGRSLRLSCAASGFTFSSYAMHWVRQAPGKGLEWVAVISYDGSNKYYADSVKGRFTISRDNSKNTLYLQMNSLRAEDTAVYYCATGSYRKYAGGFDYWGQWGQGTLVTVSSGGSSRSSSSGGGGSGGGGEIVLTQSPATLSLSPGERATLSCRASQSVSSSYLAWYQQKPGQAPRLLIYGASSRATGIPARFSGSGSGTDFTLTISRLEPEDFAVYYCQVWDSYNDHVVFGQGTKVEIK

SEQ ID NO: 5111 - protein, 251 aa, synthetic construct
QVQLVESGGGVVQPGRSLRLSCAASGFTFSSYAMHWVRQAPGKGLEWVAVISYDGSNKYYADSVKGRFTISRDNSKNTLYLQMNSLRAEDTAVYYCATGSYRKYAGGFDYWGQWGQGTLVTVSSGGSSRSSSSGGGGSGGGGEIVLTQSPATLSLSPGERATLSCRASQSVSSSYLAWYQQKPGQAPRLLIYGASSRATGIPARFSGSGSGTDFTLTISRLEPEDFAVYYCSSYASSGTWVFGQGTKVEIK

SEQ ID NO: 5112 - protein, 248 aa, synthetic construct
QVQLVESGGGVVQPGRSLRLSCAASGFTFSSYAMHWVRQAPGKGLEWVAVISYDGSNKYYADSVKGRFTISRDNSKNTLYLQMNSLRAEDTAVYYCAYSGVYERFFDYWGQWGQGTLVTVSSGGSSRSSSSGGGGSGGGGEIVLTQSPATLSLSPGERATLSCRASQSVSSSYLAWYQQKPGQAPRLLIYGASSRATGIPARFSGSGSGTDFTLTISRLEPEDFAVYYCQQTQTFPPTFGQGTKVEIK

SEQ ID NO: 5113 - protein, 248 aa, synthetic construct
QVQLVESGGGVVQPGRSLRLSCAASGFTFSSYAMHWVRQAPGKGLEWVAVISYDGSNKYYADSVKGRFTISRDNSKNTLYLQMNSLRAEDTAVYYCGKGGFWHPSYWGQWGQGTLVTVSSGGSSRSSSSGGGGSGGGGEIVLTQSPATLSLSPGERATLSCRASQSVSSSYLAWYQQKPGQAPRLLIYGASSRATGIPARFSGSGSGTDFTLTISRLEPEDFAVYYCQVWDSRSDHWVFGQGTKVEIK

SEQ ID NO: 5114 - protein, 247 aa, synthetic construct
QVQLVESGGGVVQPGRSLRLSCAASGFTFSSYAMHWVRQAPGKGLEWVAVISYDGSNKYYADSVKGRFTISRDNSKNTLYLQMNSLRAEDTAVYYCGRADYPFDIWGQWGQGTLVTVSSGGSSRSSSSGGGGSGGGGEIVLTQSPATLSLSPGERATLSCRASQSVSSSYLAWYQQKPGQAPRLLIYGASSRATGIPARFSGSGSGTDFTLTISRLEPEDFAVYYCQVWDSSGDDWVFGQGTKVEIK

SEQ ID NO: 5115 - protein, 257 aa, synthetic construct
QVQLVESGGGVVQPGRSLRLSCAASGFTFSSYAMHWVRQAPGKGLEWVAVISYDGSNKYYADSVKGRFTISRDNSKNTLYLQMNSLRAEDTAVYYCSRERPVGSYYSGLGYPKDSWGQWGQGTLVTVSSGGSSRSSSSGGGGSGGGGEIVLTQSPATLSLSPGERATLSCRASQSVSSSYLAWYQQKPGQAPRLLIYGASSRATGIPARFSGSGSGTDFTLTISRLEPEDFAVYYCRVWDSSNDHWVFGQGTKVEIK

SEQ ID NO: 5116 - protein, 253 aa, synthetic construct
QVQLVESGGGVVQPGRSLRLSCAASGFTFSSYAMHWVRQAPGKGLEWVAVISYDGSNKYYADSVKGRFTISRDNSKNTLYLQMNSLRAEDTAVYYCSRKYYHPNYGYSSDNWGQWGQGTLVTVSSGGSSRSSSSGGGGSGGGGEIVLTQSPATLSLSPGERATLSCRASQSVSSSYLAWYQQKPGQAPRLLIYGASSRATGIPARFSGSGSGTDFTLTISRLEPEDFAVYYCQVWDYSRNNWVFGQGTKVEIK

SEQ ID NO: 5117 - protein, 246 aa, synthetic construct
QVQLVESGGGVVQPGRSLRLSCAASGFTFSSYAMHWVRQAPGKGLEWVAVISYDGSNKYYADSVKGRFTISRDNSKNTLYLQMNSLRAEDTAVYYCTRDHWYSLDAWGQWGQGTLVTVSSGGSSRSSSSGGGGSGGGGEIVLTQSPATLSLSPGERATLSCRASQSVSSSYLAWYQQKPGQAPRLLIYGASSRATGIPARFSGSGSGTDFTLTISRLEPEDFAVYYCQQEDSPPITFGQGTKVEIK

SEQ ID NO: 5118 - protein, 254 aa, synthetic construct
QVQLVESGGGVVQPGRSLRLSCAASGFTFSSYAMHWVRQAPGKGLEWVAVISYDGSNKYYADSVKGRFTISRDNSKNTLYLQMNSLRAEDTAVYYCTRENAYVSFDAVDFGMDHWGQWGQGTLVTVSSGGSSRSSSSGGGGSGGGGEIVLTQSPATLSLSPGERATLSCRASQSVSSSYLAWYQQKPGQAPRLLIYGASSRATGIPARFSGSGSGTDFTLTISRLEPEDFAVYYCQQSYSPPITFGQGTKVEIK

SEQ ID NO: 5119 - protein, 247 aa, synthetic construct
QVQLVESGGGVVQPGRSLRLSCAASGFTFSSYAMHWVRQAPGKGLEWVAVISYDGSNKYYADSVKGRFTISRDNSKNTLYLQMNSLRAEDTAVYYCTRGGARYALNSWGQWGQGTLVTVSSGGSSRSSSSGGGGSGGGGEIVLTQSPATLSLSPGERATLSCRASQSVSSSYLAWYQQKPGQAPRLLIYGASSRATGIPARFSGSGSGTDFTLTISRLEPEDFAVYYCQQYYSPPITFGQGTKVEIK

SEQ ID NO: 5120 - protein, 244 aa, synthetic construct
QVQLVESGGGVVQPGRSLRLSCAASGFTFSSYAMHWVRQAPGKGLEWVAVISYDGSNKYYADSVKGRFTISRDNSKNTLYLQMNSLRAEDTAVYYCTRGGATDYWGQWGQGTLVTVSSGGSSRSSSSGGGGSGGGGEIVLTQSPATLSLSPGERATLSCRASQSVSSSYLAWYQQKPGQAPRLLIYGASSRATGIPARFSGSGSGTDFTLTISRLEPEDFAVYYCQQYGSSPKTFGQGTKVEIK

SEQ ID NO: 5121 - protein, 262 aa, synthetic construct
QVQLVESGGGVVQPGRSLRLSCAASGFTFSSYAMHWVRQAPGKGLEWVAVISYDGSNKYYADSVKGRFTISRDNSKNTLYLQMNSLRAEDTAVYYCTRHVSWYGDSAIYYYYYGQPYGMDYWGQWGQGTLVTVSSGGSSRSSSSGGGGSGGGGEIVLTQSPATLSLSPGERATLSCRASQSVSSSYLAWYQQKPGQAPRLLIYGASSRATGIPARFSGSGSGTDFTLTISRLEPEDFAVYYCQAWDSNPMVVFGQGTKVEIK

SEQ ID NO: 5122 - protein, 262 aa, synthetic construct
QVQLVESGGGVVQPGRSLRLSCAASGFTFSSYAMHWVRQAPGKGLEWVAVISYDGSNKYYADSVKGRFTISRDNSKNTLYLQMNSLRAEDTAVYYCTRHVSWYGDSAIYYYYYGQPYGMDYWGQWGQGTLVTVSSGGSSRSSSSGGGGSGGGGEIVLTQSPATLSLSPGERATLSCRASQSVSSSYLAWYQQKPGQAPRLLIYGASSRATGIPARFSGSGSGTDFTLTISRLEPEDFAVYYCQGWDSSAHVVFGQGTKVEIK

SEQ ID NO: 5123 - protein, 250 aa, synthetic construct
QVQLVESGGGVVQPGRSLRLSCAASGFTFSSYAMHWVRQAPGKGLEWVAVISYDGSNKYYADSVKGRFTISRDNSKNTLYLQMNSLRAEDTAVYYCTRQWEAQAPFDFWGQWGQGTLVTVSSGGSSRSSSSGGGGSGGGGEIVLTQSPATLSLSPGERATLSCRASQSVSSSYLAWYQQKPGQAPRLLIYGASSRATGIPARFSGSGSGTDFTLTISRLEPEDFAVYYCGTWNSSLSAGVFGQGTKVEIK

SEQ ID NO: 5124 - protein, 250 aa, synthetic construct
QVQLVESGGGVVQPGRSLRLSCAASGFTFSSYAMHWVRQAPGKGLEWVAVISYDGSNKYYADSVKGRFTISRDNSKNTLYLQMNSLRAEDTAVYYCVKKVAGSYPYDIWGQWGQGTLVTVSSGGSSRSSSSGGGGSGGGGEIVLTQSPATLSLSPGERATLSCRASQSVSSSYLAWYQQKPGQAPRLLIYGASSRATGIPARFSGSGSGTDFTLTISRLEPEDFAVYYCQAWDSSTDHVLFGQGTKVEIK

SEQ ID NO: 5125 - protein, 247 aa, synthetic construct
QVQLVESGGGVVQPGRSLRLSCAASGFTFSSYAMHWVRQAPGKGLEWVAVISYDGSNKYYADSVKGRFTISRDNSKNTLYLQMNSLRAEDTAVYYCVNNNTGWAFDIWGQWGQGTLVTVSSGGSSRSSSSGGGGSGGGGEIVLTQSPATLSLSPGERATLSCRASQSVSSSYLAWYQQKPGQAPRLLIYGASSRATGIPARFSGSGSGTDFTLTISRLEPEDFAVYYCQQSYSPPPTFGQGTKVEIK

SEQ ID NO: 5126 - protein, 250 aa, synthetic construct
QVQLVESGGGVVQPGRSLRLSCAASGFTFSSYAMHWVRQAPGKGLEWVAVISYDGSNKYYADSVKGRFTISRDNSKNTLYLQMNSLRAEDTAVYYCVRAFSYSWPFDHWGQWGQGTLVTVSSGGSSRSSSSGGGGSGGGGEIVLTQSPATLSLSPGERATLSCRASQSVSSSYLAWYQQKPGQAPRLLIYGASSRATGIPARFSGSGSGTDFTLTISRLEPEDFAVYYCASWDDSLNGRVFGQGTKVEIK

SEQ ID NO: 5127 - protein, 251 aa, synthetic construct
QVQLVESGGGVVQPGRSLRLSCAASGFTFSSYAMHWVRQAPGKGLEWVAVISYDGSNKYYADSVKGRFTISRDNSKNTLYLQMNSLRAEDTAVYYCVRAFSYSWPFDHWGQWGQGTLVTVSSGGSSRSSSSGGGGSGGGGEIVLTQSPATLSLSPGERATLSCRASQSVSSSYLAWYQQKPGQAPRLLIYGASSRATGIPARFSGSGSGTDFTLTISRLEPEDFAVYYCGTWDSSLSRGWVFGQGTKVEIK

SEQ ID NO: 5128 - protein, 248 aa, synthetic construct
QVQLVESGGGVVQPGRSLRLSCAASGFTFSSYAMHWVRQAPGKGLEWVAVISYDGSNKYYADSVKGRFTISRDNSKNTLYLQMNSLRAEDTAVYYCVRAFSYSWPFDHWGQWGQGTLVTVSSGGSSRSSSSGGGGSGGGGEIVLTQSPATLSLSPGERATLSCRASQSVSSSYLAWYQQKPGQAPRLLIYGASSRATGIPARFSGSGSGTDFTLTISRLEPEDFAVYYCLQYYTPARVFGQGTKVEIK

SEQ ID NO: 5129 - protein, 248 aa, synthetic construct
QVQLVESGGGVVQPGRSLRLSCAASGFTFSSYAMHWVRQAPGKGLEWVAVISYDGSNKYYADSVKGRFTISRDNSKNTLYLQMNSLRAEDTAVYYCVRAFSYSWPFDHWGQWGQGTLVTVSSGGSSRSSSSGGGGSGGGGEIVLTQSPATLSLSPGERATLSCRASQSVSSSYLAWYQQKPGQAPRLLIYGASSRATGIPARFSGSGSGTDFTLTISRLEPEDFAVYYCMQGAHWPWAFGQGTKVEIK

SEQ ID NO: 5130 - protein, 248 aa, synthetic construct
QVQLVESGGGVVQPGRSLRLSCAASGFTFSSYAMHWVRQAPGKGLEWVAVISYDGSNKYYADSVKGRFTISRDNSKNTLYLQMNSLRAEDTAVYYCVRAFSYSWPFDHWGQWGQGTLVTVSSGGSSRSSSSGGGGSGGGGEIVLTQSPATLSLSPGERATLSCRASQSVSSSYLAWYQQKPGQAPRLLIYGASSRATGIPARFSGSGSGTDFTLTISRLEPEDFAVYYCQQANSFPRTFGQGTKVEIK

SEQ ID NO: 5131 - protein, 248 aa, synthetic construct
QVQLVESGGGVVQPGRSLRLSCAASGFTFSSYAMHWVRQAPGKGLEWVAVISYDGSNKYYADSVKGRFTISRDNSKNTLYLQMNSLRAEDTAVYYCVRAFSYSWPFDHWGQWGQGTLVTVSSGGSSRSSSSGGGGSGGGGEIVLTQSPATLSLSPGERATLSCRASQSVSSSYLAWYQQKPGQAPRLLIYGASSRATGIPARFSGSGSGTDFTLTISRLEPEDFAVYYCQQSYSTPWTFGQGTKVEIK

SEQ ID NO: 5132 - protein, 248 aa, synthetic construct
QVQLVESGGGVVQPGRSLRLSCAASGFTFSSYAMHWVRQAPGKGLEWVAVISYDGSNKYYADSVKGRFTISRDNSKNTLYLQMNSLRAEDTAVYYCVRAFSYSWPFDHWGQWGQGTLVTVSSGGSSRSSSSGGGGSGGGGEIVLTQSPATLSLSPGERATLSCRASQSVSSSYLAWYQQKPGQAPRLLIYGASSRATGIPARFSGSGSGTDFTLTISRLEPEDFAVYYCQQYGRSMWTFGQGTKVEIK

SEQ ID NO: 5133 - protein, 248 aa, synthetic construct
QVQLVESGGGVVQPGRSLRLSCAASGFTFSSYAMHWVRQAPGKGLEWVAVISYDGSNKYYADSVKGRFTISRDNSKNTLYLQMNSLRAEDTAVYYCVRAFSYSWPFDHWGQWGQGTLVTVSSGGSSRSSSSGGGGSGGGGEIVLTQSPATLSLSPGERATLSCRASQSVSSSYLAWYQQKPGQAPRLLIYGASSRATGIPARFSGSGSGTDFTLTISRLEPEDFAVYYCQQYNNYPWTFGQGTKVEIK

SEQ ID NO: 5134 - protein, 249 aa, synthetic construct
QVQLVESGGGVVQPGRSLRLSCAASGFTFSSYAMHWVRQAPGKGLEWVAVISYDGSNKYYADSVKGRFTISRDNSKNTLYLQMNSLRAEDTAVYYCVRAFSYSWPFDHWGQWGQGTLVTVSSGGSSRSSSSGGGGSGGGGEIVLTQSPATLSLSPGERATLSCRASQSVSSSYLAWYQQKPGQAPRLLIYGASSRATGIPARFSGSGSGTDFTLTISRLEPEDFAVYYCQQYYSTPQWTFGQGTKVEIK

SEQ ID NO: 5135 - protein, 247 aa, synthetic construct
QVQLVESGGGVVQPGRSLRLSCAASGFTFSSYAMHWVRQAPGKGLEWVAVISYDGSNKYYADSVKGRFTISRDNSKNTLYLQMNSLRAEDTAVYYCVRAFSYSWPFDHWGQWGQGTLVTVSSGGSSRSSSSGGGGSGGGGEIVLTQSPATLSLSPGERATLSCRASQSVSSSYLAWYQQKPGQAPRLLIYGASSRATGIPARFSGSGSGTDFTLTISRLEPEDFAVYYCQQYYSTPTFGQGTKVEIK

SEQ ID NO: 5136 - protein, 250 aa, synthetic construct
QVQLVESGGGVVQPGRSLRLSCAASGFTFSSYAMHWVRQAPGKGLEWVAVISYDGSNKYYADSVKGRFTISRDNSKNTLYLQMNSLRAEDTAVYYCVRAFSYSWPFDHWGQWGQGTLVTVSSGGSSRSSSSGGGGSGGGGEIVLTQSPATLSLSPGERATLSCRASQSVSSSYLAWYQQKPGQAPRLLIYGASSRATGIPARFSGSGSGTDFTLTISRLEPEDFAVYYCQVWDSSSDHWVFGQGTKVEIK

SEQ ID NO: 5137 - protein, 248 aa, synthetic construct
QVQLVESGGGVVQPGRSLRLSCAASGFTFSSYAMHWVRQAPGKGLEWVAVISYDGSNKYYADSVKGRFTISRDNSKNTLYLQMNSLRAEDTAVYYCVRAFSYSWPFDHWGQWGQGTLVTVSSGGSSRSSSSGGGGSGGGGEIVLTQSPATLSLSPGERATLSCRASQSVSSSYLAWYQQKPGQAPRLLIYGASSRATGIPARFSGSGSGTDFTLTISRLEPEDFAVYYCSSYATSRPKFGQGTKVEIK

SEQ ID NO: 5138 - protein, 250 aa, synthetic construct
QVQLVESGGGVVQPGRSLRLSCAASGFTFSSYAMHWVRQAPGKGLEWVAVISYDGSNKYYADSVKGRFTISRDNSKNTLYLQMNSLRAEDTAVYYCVRAFSYSWPFDHWGQWGQGTLVTVSSGGSSRSSSSGGGGSGGGGEIVLTQSPATLSLSPGERATLSCRASQSVSSSYLAWYQQKPGQAPRLLIYGASSRATGIPARFSGSGSGTDFTLTISRLEPEDFAVYYCSSYTSSSTPYVFGQGTKVEIK

SEQ ID NO: 5139 - protein, 248 aa, synthetic construct
QVQLVESGGGVVQPGRSLRLSCAASGFTFSSYAMHWVRQAPGKGLEWVAVISYDGSNKYYADSVKGRFTISRDNSKNTLYLQMNSLRAEDTAVYYCVRDSTYYGLDIWGQWGQGTLVTVSSGGSSRSSSSGGGGSGGGGEIVLTQSPATLSLSPGERATLSCRASQSVSSSYLAWYQQKPGQAPRLLIYGASSRATGIPARFSGSGSGTDFTLTISRLEPEDFAVYYCSSYTTAATLVFGQGTKVEIK

SEQ ID NO: 5140 - protein, 253 aa, synthetic construct
QVQLVESGGGVVQPGRSLRLSCAASGFTFSSYAMHWVRQAPGKGLEWVAVISYDGSNKYYADSVKGRFTISRDNSKNTLYLQMNSLRAEDTAVYYCVRDSVGYRDQPGYYLDYWGQWGQGTLVTVSSGGSSRSSSSGGGGSGGGGEIVLTQSPATLSLSPGERATLSCRASQSVSSSYLAWYQQKPGQAPRLLIYGASSRATGIPARFSGSGSGTDFTLTISRLEPEDFAVYYCQAWDSRTGVFGQGTKVEIK

SEQ ID NO: 5141 - protein, 250 aa, synthetic construct
QVQLVESGGGVVQPGRSLRLSCAASGFTFSSYAMHWVRQAPGKGLEWVAVISYDGSNKYYADSVKGRFTISRDNSKNTLYLQMNSLRAEDTAVYYCVREGFSGTWTAFDIWGQWGQGTLVTVSSGGSSRSSSSGGGGSGGGGEIVLTQSPATLSLSPGERATLSCRASQSVSSSYLAWYQQKPGQAPRLLIYGASSRATGIPARFSGSGSGTDFTLTISRLEPEDFAVYYCQQSYSPPPTFGQGTKVEIK

SEQ ID NO: 5142 - protein, 245 aa, synthetic construct
QVQLVESGGGVVQPGRSLRLSCAASGFTFSSYAMHWVRQAPGKGLEWVAVISYDGSNKYYADSVKGRFTISRDNSKNTLYLQMNSLRAEDTAVYYCVRHSTVPDYWGQWGQGTLVTVSSGGSSRSSSSGGGGSGGGGEIVLTQSPATLSLSPGERATLSCRASQSVSSSYLAWYQQKPGQAPRLLIYGASSRATGIPARFSGSGSGTDFTLTISRLEPEDFAVYYCQQYDSPPLTFGQGTKVEIK

SEQ ID NO: 5143 - protein, 250 aa, synthetic construct
QVQLVESGGGVVQPGRSLRLSCAASGFTFSSYAMHWVRQAPGKGLEWVAVISYDGSNKYYADSVKGRFTISRDNSKNTLYLQMNSLRAEDTAVYYCAKDHTMLGSFDYWGQWGQGTLVTVSSGGSSRSSSSGGGGSGGGGEIVLTQSPATLSLSPGERATLSCRASQSVSSSYLAWYQQKPGQAPRLLIYGASSRATGIPARFSGSGSGTDFTLTISRLEPEDFAVYYCQAWDSSSTDVVFGQGTKVEIK

SEQ ID NO: 5144 - protein, 248 aa, synthetic construct
QVQLVESGGGVVQPGRSLRLSCAASGFTFSSYAMHWVRQAPGKGLEWVAVISYDGSNKYYADSVKGRFTISRDNSKNTLYLQMNSLRAEDTAVYYCAKDHTMLGSFDYWGQWGQGTLVTVSSGGSSRSSSSGGGGSGGGGEIVLTQSPATLSLSPGERATLSCRASQSVSSSYLAWYQQKPGQAPRLLIYGASSRATGIPARFSGSGSGTDFTLTISRLEPEDFAVYYCQQRANWPLTFGQGTKVEIK

SEQ ID NO: 5145 - protein, 247 aa, synthetic construct
QVQLVESGGGVVQPGRSLRLSCAASGFTFSSYAMHWVRQAPGKGLEWVAVISYDGSNKYYADSVKGRFTISRDNSKNTLYLQMNSLRAEDTAVYYCAKDLIYTAQDYWGQWGQGTLVTVSSGGSSRSSSSGGGGSGGGGEIVLTQSPATLSLSPGERATLSCRASQSVSSSYLAWYQQKPGQAPRLLIYGASSRATGIPARFSGSGSGTDFTLTISRLEPEDFAVYYCQQVGSTPYTFGQGTKVEIK

SEQ ID NO: 5146 - protein, 251 aa, synthetic construct
QVQLVESGGGVVQPGRSLRLSCAASGFTFSSYAMHWVRQAPGKGLEWVAVISYDGSNKYYADSVKGRFTISRDNSKNTLYLQMNSLRAEDTAVYYCAKDLIYTAQDYWGQWGQGTLVTVSSGGSSRSSSSGGGGSGGGGEIVLTQSPATLSLSPGERATLSCRASQSVSSSYLAWYQQKPGQAPRLLIYGASSRATGIPARFSGSGSGTDFTLTISRLEPEDFAVYYCQSYDSSLLSPLVVFGQGTKVEIK

SEQ ID NO: 5147 - protein, 248 aa, synthetic construct
QVQLVESGGGVVQPGRSLRLSCAASGFTFSSYAMHWVRQAPGKGLEWVAVISYDGSNKYYADSVKGRFTISRDNSKNTLYLQMNSLRAEDTAVYYCAKDLIYTAQDYWGQWGQGTLVTVSSGGSSRSSSSGGGGSGGGGEIVLTQSPATLSLSPGERATLSCRASQSVSSSYLAWYQQKPGQAPRLLIYGASSRATGIPARFSGSGSGTDFTLTISRLEPEDFAVYYCSSYTSSSNAVFGQGTKVEIK

SEQ ID NO: 5148 - protein, 254 aa, synthetic construct
QVQLVESGGGVVQPGRSLRLSCAASGFTFSSYAMHWVRQAPGKGLEWVAVISYDGSNKYYADSVKGRFTISRDNSKNTLYLQMNSLRAEDTAVYYCAKDWGWYRGYGHAGAVDIWGQWGQGTLVTVSSGGSSRSSSSGGGGSGGGGEIVLTQSPATLSLSPGERATLSCRASQSVSSSYLAWYQQKPGQAPRLLIYGASSRATGIPARFSGSGSGTDFTLTISRLEPEDFAVYYCHQSSRFPITFGQGTKVEIK

SEQ ID NO: 5149 - protein, 256 aa, synthetic construct
QVQLVESGGGVVQPGRSLRLSCAASGFTFSSYAMHWVRQAPGKGLEWVAVISYDGSNKYYADSVKGRFTISRDNSKNTLYLQMNSLRAEDTAVYYCAKDWGWYRGYGHAGAVDIWGQWGQGTLVTVSSGGSSRSSSSGGGGSGGGGEIVLTQSPATLSLSPGERATLSCRASQSVSSSYLAWYQQKPGQAPRLLIYGASSRATGIPARFSGSGSGTDFTLTISRLEPEDFAVYYCQQYYSTPPMYSFGQGTKVEIK

SEQ ID NO: 5150 - protein, 257 aa, synthetic construct
QVQLVESGGGVVQPGRSLRLSCAASGFTFSSYAMHWVRQAPGKGLEWVAVISYDGSNKYYADSVKGRFTISRDNSKNTLYLQMNSLRAEDTAVYYCAKDWGWYRGYGHAGAVDIWGQWGQGTLVTVSSGGSSRSSSSGGGGSGGGGEIVLTQSPATLSLSPGERATLSCRASQSVSSSYLAWYQQKPGQAPRLLIYGASSRATGIPARFSGSGSGTDFTLTISRLEPEDFAVYYCQVLDSSDDHPVVFGQGTKVEIK

SEQ ID NO: 5151 - protein, 250 aa, synthetic construct
QVQLVESGGGVVQPGRSLRLSCAASGFTFSSYAMHWVRQAPGKGLEWVAVISYDGSNKYYADSVKGRFTISRDNSKNTLYLQMNSLRAEDTAVYYCAKETTGIGAFDYWGQWGQGTLVTVSSGGSSRSSSSGGGGSGGGGEIVLTQSPATLSLSPGERATLSCRASQSVSSSYLAWYQQKPGQAPRLLIYGASSRATGIPARFSGSGSGTDFTLTISRLEPEDFAVYYCASWDDSLSGWVFGQGTKVEIK

SEQ ID NO: 5152 - protein, 252 aa, synthetic construct
QVQLVESGGGVVQPGRSLRLSCAASGFTFSSYAMHWVRQAPGKGLEWVAVISYDGSNKYYADSVKGRFTISRDNSKNTLYLQMNSLRAEDTAVYYCAKGGYGHSGYAFDYWGQWGQGTLVTVSSGGSSRSSSSGGGGSGGGGEIVLTQSPATLSLSPGERATLSCRASQSVSSSYLAWYQQKPGQAPRLLIYGASSRATGIPARFSGSGSGTDFTLTISRLEPEDFAVYYCAVWDDSLSGYVFGQGTKVEIK

SEQ ID NO: 5153 - protein, 249 aa, synthetic construct
QVQLVESGGGVVQPGRSLRLSCAASGFTFSSYAMHWVRQAPGKGLEWVAVISYDGSNKYYADSVKGRFTISRDNSKNTLYLQMNSLRAEDTAVYYCAKGLIDRYTRTDYWGQWGQGTLVTVSSGGSSRSSSSGGGGSGGGGEIVLTQSPATLSLSPGERATLSCRASQSVSSSYLAWYQQKPGQAPRLLIYGASSRATGIPARFSGSGSGTDFTLTISRLEPEDFAVYYCQQANSFPVTFGQGTKVEIK

SEQ ID NO: 5154 - protein, 258 aa, synthetic construct
QVQLVESGGGVVQPGRSLRLSCAASGFTFSSYAMHWVRQAPGKGLEWVAVISYDGSNKYYADSVKGRFTISRDNSKNTLYLQMNSLRAEDTAVYYCAKSDEYRAVGPYDYWSYAAFDYWGQWGQGTLVTVSSGGSSRSSSSGGGGSGGGGEIVLTQSPATLSLSPGERATLSCRASQSVSSSYLAWYQQKPGQAPRLLIYGASSRATGIPARFSGSGSGTDFTLTISRLEPEDFAVYYCQSWGDAYYVFGQGTKVEIK

SEQ ID NO: 5155 - protein, 250 aa, synthetic construct
QVQLVESGGGVVQPGRSLRLSCAASGFTFSSYAMHWVRQAPGKGLEWVAVISYDGSNKYYADSVKGRFTISRDNSKNTLYLQMNSLRAEDTAVYYCAKVLSGTRATLDYWGQWGQGTLVTVSSGGSSRSSSSGGGGSGGGGEIVLTQSPATLSLSPGERATLSCRASQSVSSSYLAWYQQKPGQAPRLLIYGASSRATGIPARFSGSGSGTDFTLTISRLEPEDFAVYYCQAWDSTLHGVFGQGTKVEIK

SEQ ID NO: 5156 - protein, 258 aa, synthetic construct
QVQLVESGGGVVQPGRSLRLSCAASGFTFSSYAMHWVRQAPGKGLEWVAVISYDGSNKYYADSVKGRFTISRDNSKNTLYLQMNSLRAEDTAVYYCARDGYFYRRNVTTYYSSYMDYWGQWGQGTLVTVSSGGSSRSSSSGGGGSGGGGEIVLTQSPATLSLSPGERATLSCRASQSVSSSYLAWYQQKPGQAPRLLIYGASSRATGIPARFSGSGSGTDFTLTISRLEPEDFAVYYCSADAGDNNLLFGQGTKVEIK

SEQ ID NO: 5157 - protein, 246 aa, synthetic construct
QVQLVESGGGVVQPGRSLRLSCAASGFTFSSYAMHWVRQAPGKGLEWVAVISYDGSNKYYADSVKGRFTISRDNSKNTLYLQMNSLRAEDTAVYYCARDPGYRNDYWGQWGQGTLVTVSSGGSSRSSSSGGGGSGGGGEIVLTQSPATLSLSPGERATLSCRASQSVSSSYLAWYQQKPGQAPRLLIYGASSRATGIPARFSGSGSGTDFTLTISRLEPEDFAVYYCQQEDSRPRTFGQGTKVEIK

SEQ ID NO: 5158 - protein, 256 aa, synthetic construct
QVQLVESGGGVVQPGRSLRLSCAASGFTFSSYAMHWVRQAPGKGLEWVAVISYDGSNKYYADSVKGRFTISRDNSKNTLYLQMNSLRAEDTAVYYCARDSGGYRTSGPYFQGYAMDVWGQWGQGTLVTVSSGGSSRSSSSGGGGSGGGGEIVLTQSPATLSLSPGERATLSCRASQSVSSSYLAWYQQKPGQAPRLLIYGASSRATGIPARFSGSGSGTDFTLTISRLEPEDFAVYYCQQYFSTPSFGQGTKVEIK

SEQ ID NO: 5159 - protein, 257 aa, synthetic construct
QVQLVESGGGVVQPGRSLRLSCAASGFTFSSYAMHWVRQAPGKGLEWVAVISYDGSNKYYADSVKGRFTISRDNSKNTLYLQMNSLRAEDTAVYYCARDTDGYRSSFYSTAYWMDPWGQWGQGTLVTVSSGGSSRSSSSGGGGSGGGGEIVLTQSPATLSLSPGERATLSCRASQSVSSSYLAWYQQKPGQAPRLLIYGASSRATGIPARFSGSGSGTDFTLTISRLEPEDFAVYYCSSYTSSSTLVFGQGTKVEIK

SEQ ID NO: 5160 - protein, 255 aa, synthetic construct
QVQLVESGGGVVQPGRSLRLSCAASGFTFSSYAMHWVRQAPGKGLEWVAVISYDGSNKYYADSVKGRFTISRDNSKNTLYLQMNSLRAEDTAVYYCARFRMSSDVYYNPAYMDIWGQWGQGTLVTVSSGGSSRSSSSGGGGSGGGGEIVLTQSPATLSLSPGERATLSCRASQSVSSSYLAWYQQKPGQAPRLLIYGASSRATGIPARFSGSGSGTDFTLTISRLEPEDFAVYYCSSYTHNTTWVFGQGTKVEIK

SEQ ID NO: 5161 - protein, 252 aa, synthetic construct
QVQLVESGGGVVQPGRSLRLSCAASGFTFSSYAMHWVRQAPGKGLEWVAVISYDGSNKYYADSVKGRFTISRDNSKNTLYLQMNSLRAEDTAVYYCARGHYRRTGEGMDYWGQWGQGTLVTVSSGGSSRSSSSGGGGSGGGGEIVLTQSPATLSLSPGERATLSCRASQSVSSSYLAWYQQKPGQAPRLLIYGASSRATGIPARFSGSGSGTDFTLTISRLEPEDFAVYYCQQYNNWTPPYTFGQGTKVEIK

SEQ ID NO: 5162 - protein, 255 aa, synthetic construct
QVQLVESGGGVVQPGRSLRLSCAASGFTFSSYAMHWVRQAPGKGLEWVAVISYDGSNKYYADSVKGRFTISRDNSKNTLYLQMNSLRAEDTAVYYCARGTNSYRRLVYDAFDIWGQWGQGTLVTVSSGGSSRSSSSGGGGSGGGGEIVLTQSPATLSLSPGERATLSCRASQSVSSSYLAWYQQKPGQAPRLLIYGASSRATGIPARFSGSGSGTDFTLTISRLEPEDFAVYYCQSYDSSSSHVVFGQGTKVEIK

SEQ ID NO: 5163 - protein, 250 aa, synthetic construct
QVQLVESGGGVVQPGRSLRLSCAASGFTFSSYAMHWVRQAPGKGLEWVAVISYDGSNKYYADSVKGRFTISRDNSKNTLYLQMNSLRAEDTAVYYCARYYDPTGYLTDYWGQWGQGTLVTVSSGGSSRSSSSGGGGSGGGGEIVLTQSPATLSLSPGERATLSCRASQSVSSSYLAWYQQKPGQAPRLLIYGASSRATGIPARFSGSGSGTDFTLTISRLEPEDFAVYYCSSYTSSTTQVFGQGTKVEIK

SEQ ID NO: 5164 - protein, 253 aa, synthetic construct
QVQLVESGGGVVQPGRSLRLSCAASGFTFSSYAMHWVRQAPGKGLEWVAVISYDGSNKYYADSVKGRFTISRDNSKNTLYLQMNSLRAEDTAVYYCATGGYRGVLAGVAFDIWGQWGQGTLVTVSSGGSSRSSSSGGGGSGGGGEIVLTQSPATLSLSPGERATLSCRASQSVSSSYLAWYQQKPGQAPRLLIYGASSRATGIPARFSGSGSGTDFTLTISRLEPEDFAVYYCQVWDSSTSEVFGQGTKVEIK

SEQ ID NO: 5165 - protein, 248 aa, synthetic construct
QVQLVESGGGVVQPGRSLRLSCAASGFTFSSYAMHWVRQAPGKGLEWVAVISYDGSNKYYADSVKGRFTISRDNSKNTLYLQMNSLRAEDTAVYYCSKGHSTMQYFDYWGQWGQGTLVTVSSGGSSRSSSSGGGGSGGGGEIVLTQSPATLSLSPGERATLSCRASQSVSSSYLAWYQQKPGQAPRLLIYGASSRATGIPARFSGSGSGTDFTLTISRLEPEDFAVYYCSSFADSRYIFGQGTKVEIK

SEQ ID NO: 5166 - protein, 245 aa, synthetic construct
QVQLVESGGGVVQPGRSLRLSCAASGFTFSSYAMHWVRQAPGKGLEWVAVISYDGSNKYYADSVKGRFTISRDNSKNTLYLQMNSLRAEDTAVYYCADLQYDYWGQWGQGTLVTVSSGGSSRSSSSGGGGSGGGGEIVLTQSPATLSLSPGERATLSCRASQSVSSSYLAWYQQKPGQAPRLLIYGASSRATGIPARFSGSGSGTDFTLTISRLEPEDFAVYYCAAWDDSSGRWVFGQGTKVEIK

SEQ ID NO: 5167 - protein, 244 aa, synthetic construct
QVQLVESGGGVVQPGRSLRLSCAASGFTFSSYAMHWVRQAPGKGLEWVAVISYDGSNKYYADSVKGRFTISRDNSKNTLYLQMNSLRAEDTAVYYCADLQYDYWGQWGQGTLVTVSSGGSSRSSSSGGGGSGGGGEIVLTQSPATLSLSPGERATLSCRASQSVSSSYLAWYQQKPGQAPRLLIYGASSRATGIPARFSGSGSGTDFTLTISRLEPEDFAVYYCQQYYSTTPYTFGQGTKVEIK

SEQ ID NO: 5168 - protein, 244 aa, synthetic construct
QVQLVESGGGVVQPGRSLRLSCAASGFTFSSYAMHWVRQAPGKGLEWVAVISYDGSNKYYADSVKGRFTISRDNSKNTLYLQMNSLRAEDTAVYYCADLQYDYWGQWGQGTLVTVSSGGSSRSSSSGGGGSGGGGEIVLTQSPATLSLSPGERATLSCRASQSVSSSYLAWYQQKPGQAPRLLIYGASSRATGIPARFSGSGSGTDFTLTISRLEPEDFAVYYCQVWDSSDGVVFGQGTKVEIK

SEQ ID NO: 5169 - protein, 252 aa, synthetic construct
QVQLVESGGGVVQPGRSLRLSCAASGFTFSSYAMHWVRQAPGKGLEWVAVISYDGSNKYYADSVKGRFTISRDNSKNTLYLQMNSLRAEDTAVYYCAHRLWTTGWGRDAFDIWGQWGQGTLVTVSSGGSSRSSSSGGGGSGGGGEIVLTQSPATLSLSPGERATLSCRASQSVSSSYLAWYQQKPGQAPRLLIYGASSRATGIPARFSGSGSGTDFTLTISRLEPEDFAVYYCQTWTTGHWVFGQGTKVEIK

SEQ ID NO: 5170 - protein, 252 aa, synthetic construct
QVQLVESGGGVVQPGRSLRLSCAASGFTFSSYAMHWVRQAPGKGLEWVAVISYDGSNKYYADSVKGRFTISRDNSKNTLYLQMNSLRAEDTAVYYCAKAIDALAAFDYWGQWGQGTLVTVSSGGSSRSSSSGGGGSGGGGEIVLTQSPATLSLSPGERATLSCRASQSVSSSYLAWYQQKPGQAPRLLIYGASSRATGIPARFSGSGSGTDFTLTISRLEPEDFAVYYCQVWDSSSSHHLVVFGQGTKVEIK

SEQ ID NO: 5171 - protein, 251 aa, synthetic construct
QVQLVESGGGVVQPGRSLRLSCAASGFTFSSYAMHWVRQAPGKGLEWVAVISYDGSNKYYADSVKGRFTISRDNSKNTLYLQMNSLRAEDTAVYYCAKAIDALAAFDYWGQWGQGTLVTVSSGGSSRSSSSGGGGSGGGGEIVLTQSPATLSLSPGERATLSCRASQSVSSSYLAWYQQKPGQAPRLLIYGASSRATGIPARFSGSGSGTDFTLTISRLEPEDFAVYYCQVWDSSSSLSVVFGQGTKVEIK

SEQ ID NO: 5172 - protein, 250 aa, synthetic construct
QVQLVESGGGVVQPGRSLRLSCAASGFTFSSYAMHWVRQAPGKGLEWVAVISYDGSNKYYADSVKGRFTISRDNSKNTLYLQMNSLRAEDTAVYYCAKDFRGGGSFDYWGQWGQGTLVTVSSGGSSRSSSSGGGGSGGGGEIVLTQSPATLSLSPGERATLSCRASQSVSSSYLAWYQQKPGQAPRLLIYGASSRATGIPARFSGSGSGTDFTLTISRLEPEDFAVYYCQQYGSSSPRWTFGQGTKVEIK

SEQ ID NO: 5173 - protein, 250 aa, synthetic construct
QVQLVESGGGVVQPGRSLRLSCAASGFTFSSYAMHWVRQAPGKGLEWVAVISYDGSNKYYADSVKGRFTISRDNSKNTLYLQMNSLRAEDTAVYYCAKDFRGGGSFDYWGQWGQGTLVTVSSGGSSRSSSSGGGGSGGGGEIVLTQSPATLSLSPGERATLSCRASQSVSSSYLAWYQQKPGQAPRLLIYGASSRATGIPARFSGSGSGTDFTLTISRLEPEDFAVYYCQSYDSSLSGWVFGQGTKVEIK

SEQ ID NO: 5174 - protein, 248 aa, synthetic construct
QVQLVESGGGVVQPGRSLRLSCAASGFTFSSYAMHWVRQAPGKGLEWVAVISYDGSNKYYADSVKGRFTISRDNSKNTLYLQMNSLRAEDTAVYYCAKDGGGVYTLDYWGQWGQGTLVTVSSGGSSRSSSSGGGGSGGGGEIVLTQSPATLSLSPGERATLSCRASQSVSSSYLAWYQQKPGQAPRLLIYGASSRATGIPARFSGSGSGTDFTLTISRLEPEDFAVYYCMQGKQWPKAFGQGTKVEIK

SEQ ID NO: 5175 - protein, 249 aa, synthetic construct
QVQLVESGGGVVQPGRSLRLSCAASGFTFSSYAMHWVRQAPGKGLEWVAVISYDGSNKYYADSVKGRFTISRDNSKNTLYLQMNSLRAEDTAVYYCAKDGGGVYTLDYWGQWGQGTLVTVSSGGSSRSSSSGGGGSGGGGEIVLTQSPATLSLSPGERATLSCRASQSVSSSYLAWYQQKPGQAPRLLIYGASSRATGIPARFSGSGSGTDFTLTISRLEPEDFAVYYCQAWDSSTTVVFGQGTKVEIK

SEQ ID NO: 5176 - protein, 250 aa, synthetic construct
QVQLVESGGGVVQPGRSLRLSCAASGFTFSSYAMHWVRQAPGKGLEWVAVISYDGSNKYYADSVKGRFTISRDNSKNTLYLQMNSLRAEDTAVYYCAKDGGGVYTLDYWGQWGQGTLVTVSSGGSSRSSSSGGGGSGGGGEIVLTQSPATLSLSPGERATLSCRASQSVSSSYLAWYQQKPGQAPRLLIYGASSRATGIPARFSGSGSGTDFTLTISRLEPEDFAVYYCSSYTSSSIRRVFGQGTKVEIK

SEQ ID NO: 5177 - protein, 256 aa, synthetic construct
QVQLVESGGGVVQPGRSLRLSCAASGFTFSSYAMHWVRQAPGKGLEWVAVISYDGSNKYYADSVKGRFTISRDNSKNTLYLQMNSLRAEDTAVYYCAKDGHWYRGYYGSYYLDYWGQWGQGTLVTVSSGGSSRSSSSGGGGSGGGGEIVLTQSPATLSLSPGERATLSCRASQSVSSSYLAWYQQKPGQAPRLLIYGASSRATGIPARFSGSGSGTDFTLTISRLEPEDFAVYYCQQRGNWPRLFSFGQGTKVEIK

SEQ ID NO: 5178 - protein, 257 aa, synthetic construct
QVQLVESGGGVVQPGRSLRLSCAASGFTFSSYAMHWVRQAPGKGLEWVAVISYDGSNKYYADSVKGRFTISRDNSKNTLYLQMNSLRAEDTAVYYCAKDGHWYRGYYGSYYLDYWGQWGQGTLVTVSSGGSSRSSSSGGGGSGGGGEIVLTQSPATLSLSPGERATLSCRASQSVSSSYLAWYQQKPGQAPRLLIYGASSRATGIPARFSGSGSGTDFTLTISRLEPEDFAVYYCQVWDSSSGHRVVFGQGTKVEIK

SEQ ID NO: 5179 - protein, 255 aa, synthetic construct
QVQLVESGGGVVQPGRSLRLSCAASGFTFSSYAMHWVRQAPGKGLEWVAVISYDGSNKYYADSVKGRFTISRDNSKNTLYLQMNSLRAEDTAVYYCAKDGHWYRGYYGSYYLDYWGQWGQGTLVTVSSGGSSRSSSSGGGGSGGGGEIVLTQSPATLSLSPGERATLSCRASQSVSSSYLAWYQQKPGQAPRLLIYGASSRATGIPARFSGSGSGTDFTLTISRLEPEDFAVYYCQVWDSSSNVVFGQGTKVEIK

SEQ ID NO: 5180 - protein, 250 aa, synthetic construct
QVQLVESGGGVVQPGRSLRLSCAASGFTFSSYAMHWVRQAPGKGLEWVAVISYDGSNKYYADSVKGRFTISRDNSKNTLYLQMNSLRAEDTAVYYCAKDHTMLGSFDYWGQWGQGTLVTVSSGGSSRSSSSGGGGSGGGGEIVLTQSPATLSLSPGERATLSCRASQSVSSSYLAWYQQKPGQAPRLLIYGASSRATGIPARFSGSGSGTDFTLTISRLEPEDFAVYYCGTWDSSMGTWVFGQGTKVEIK

SEQ ID NO: 5181 - protein, 248 aa, synthetic construct
QVQLVESGGGVVQPGRSLRLSCAASGFTFSSYAMHWVRQAPGKGLEWVAVISYDGSNKYYADSVKGRFTISRDNSKNTLYLQMNSLRAEDTAVYYCAKDHTMLGSFDYWGQWGQGTLVTVSSGGSSRSSSSGGGGSGGGGEIVLTQSPATLSLSPGERATLSCRASQSVSSSYLAWYQQKPGQAPRLLIYGASSRATGIPARFSGSGSGTDFTLTISRLEPEDFAVYYCKHHNSDRWTFGQGTKVEIK

SEQ ID NO: 5182 - protein, 252 aa, synthetic construct
QVQLVESGGGVVQPGRSLRLSCAASGFTFSSYAMHWVRQAPGKGLEWVAVISYDGSNKYYADSVKGRFTISRDNSKNTLYLQMNSLRAEDTAVYYCAKDISSWYKSGAFGYWGQWGQGTLVTVSSGGSSRSSSSGGGGSGGGGEIVLTQSPATLSLSPGERATLSCRASQSVSSSYLAWYQQKPGQAPRLLIYGASSRATGIPARFSGSGSGTDFTLTISRLEPEDFAVYYCQQYHNRPLWTFGQGTKVEIK

SEQ ID NO: 5183 - protein, 252 aa, synthetic construct
QVQLVESGGGVVQPGRSLRLSCAASGFTFSSYAMHWVRQAPGKGLEWVAVISYDGSNKYYADSVKGRFTISRDNSKNTLYLQMNSLRAEDTAVYYCAKDISSWYKSGAFGYWGQWGQGTLVTVSSGGSSRSSSSGGGGSGGGGEIVLTQSPATLSLSPGERATLSCRASQSVSSSYLAWYQQKPGQAPRLLIYGASSRATGIPARFSGSGSGTDFTLTISRLEPEDFAVYYCQSAASSGSVVFGQGTKVEIK

SEQ ID NO: 5184 - protein, 249 aa, synthetic construct
QVQLVESGGGVVQPGRSLRLSCAASGFTFSSYAMHWVRQAPGKGLEWVAVISYDGSNKYYADSVKGRFTISRDNSKNTLYLQMNSLRAEDTAVYYCAKDLGFTRGFDPWGQWGQGTLVTVSSGGSSRSSSSGGGGSGGGGEIVLTQSPATLSLSPGERATLSCRASQSVSSSYLAWYQQKPGQAPRLLIYGASSRATGIPARFSGSGSGTDFTLTISRLEPEDFAVYYCQSYDSSSDWVFGQGTKVEIK

SEQ ID NO: 5185 - protein, 257 aa, synthetic construct
QVQLVESGGGVVQPGRSLRLSCAASGFTFSSYAMHWVRQAPGKGLEWVAVISYDGSNKYYADSVKGRFTISRDNSKNTLYLQMNSLRAEDTAVYYCAKDLGWYRGYGHAGAVDIWGQWGQGTLVTVSSGGSSRSSSSGGGGSGGGGEIVLTQSPATLSLSPGERATLSCRASQSVSSSYLAWYQQKPGQAPRLLIYGASSRATGIPARFSGSGSGTDFTLTISRLEPEDFAVYYCAAWDDSLSSGGVFGQGTKVEIK

SEQ ID NO: 5186 - protein, 249 aa, synthetic construct
QVQLVESGGGVVQPGRSLRLSCAASGFTFSSYAMHWVRQAPGKGLEWVAVISYDGSNKYYADSVKGRFTISRDNSKNTLYLQMNSLRAEDTAVYYCAKDLIYTAQDYWGQWGQGTLVTVSSGGSSRSSSSGGGGSGGGGEIVLTQSPATLSLSPGERATLSCRASQSVSSSYLAWYQQKPGQAPRLLIYGASSRATGIPARFSGSGSGTDFTLTISRLEPEDFAVYYCAEWADSLSGGVFGQGTKVEIK

SEQ ID NO: 5187 - protein, 247 aa, synthetic construct
QVQLVESGGGVVQPGRSLRLSCAASGFTFSSYAMHWVRQAPGKGLEWVAVISYDGSNKYYADSVKGRFTISRDNSKNTLYLQMNSLRAEDTAVYYCAKDLIYTAQDYWGQWGQGTLVTVSSGGSSRSSSSGGGGSGGGGEIVLTQSPATLSLSPGERATLSCRASQSVSSSYLAWYQQKPGQAPRLLIYGASSRATGIPARFSGSGSGTDFTLTISRLEPEDFAVYYCQQLRGYPLTFGQGTKVEIK

SEQ ID NO: 5188 - protein, 248 aa, synthetic construct
QVQLVESGGGVVQPGRSLRLSCAASGFTFSSYAMHWVRQAPGKGLEWVAVISYDGSNKYYADSVKGRFTISRDNSKNTLYLQMNSLRAEDTAVYYCAKDLIYTAQDYWGQWGQGTLVTVSSGGSSRSSSSGGGGSGGGGEIVLTQSPATLSLSPGERATLSCRASQSVSSSYLAWYQQKPGQAPRLLIYGASSRATGIPARFSGSGSGTDFTLTISRLEPEDFAVYYCQQSDSTLSWSFGQGTKVEIK

SEQ ID NO: 5189 - protein, 247 aa, synthetic construct
QVQLVESGGGVVQPGRSLRLSCAASGFTFSSYAMHWVRQAPGKGLEWVAVISYDGSNKYYADSVKGRFTISRDNSKNTLYLQMNSLRAEDTAVYYCAKDLIYTAQDYWGQWGQGTLVTVSSGGSSRSSSSGGGGSGGGGEIVLTQSPATLSLSPGERATLSCRASQSVSSSYLAWYQQKPGQAPRLLIYGASSRATGIPARFSGSGSGTDFTLTISRLEPEDFAVYYCSQGANWPWVFGQGTKVEIK

SEQ ID NO: 5190 - protein, 250 aa, synthetic construct
QVQLVESGGGVVQPGRSLRLSCAASGFTFSSYAMHWVRQAPGKGLEWVAVISYDGSNKYYADSVKGRFTISRDNSKNTLYLQMNSLRAEDTAVYYCAKDLRFSGVFDYWGQWGQGTLVTVSSGGSSRSSSSGGGGSGGGGEIVLTQSPATLSLSPGERATLSCRASQSVSSSYLAWYQQKPGQAPRLLIYGASSRATGIPARFSGSGSGTDFTLTISRLEPEDFAVYYCQSYDSSGPGWVFGQGTKVEIK

SEQ ID NO: 5191 - protein, 250 aa, synthetic construct
QVQLVESGGGVVQPGRSLRLSCAASGFTFSSYAMHWVRQAPGKGLEWVAVISYDGSNKYYADSVKGRFTISRDNSKNTLYLQMNSLRAEDTAVYYCAKDLTFARALDYWGQWGQGTLVTVSSGGSSRSSSSGGGGSGGGGEIVLTQSPATLSLSPGERATLSCRASQSVSSSYLAWYQQKPGQAPRLLIYGASSRATGIPARFSGSGSGTDFTLTISRLEPEDFAVYYCATGDDSRNGVVFGQGTKVEIK

SEQ ID NO: 5192 - protein, 250 aa, synthetic construct
QVQLVESGGGVVQPGRSLRLSCAASGFTFSSYAMHWVRQAPGKGLEWVAVISYDGSNKYYADSVKGRFTISRDNSKNTLYLQMNSLRAEDTAVYYCAKDLTFARALDYWGQWGQGTLVTVSSGGSSRSSSSGGGGSGGGGEIVLTQSPATLSLSPGERATLSCRASQSVSSSYLAWYQQKPGQAPRLLIYGASSRATGIPARFSGSGSGTDFTLTISRLEPEDFAVYYCEAWDDSSIGWVFGQGTKVEIK

SEQ ID NO: 5193 - protein, 248 aa, synthetic construct
QVQLVESGGGVVQPGRSLRLSCAASGFTFSSYAMHWVRQAPGKGLEWVAVISYDGSNKYYADSVKGRFTISRDNSKNTLYLQMNSLRAEDTAVYYCAKDLTFARALDYWGQWGQGTLVTVSSGGSSRSSSSGGGGSGGGGEIVLTQSPATLSLSPGERATLSCRASQSVSSSYLAWYQQKPGQAPRLLIYGASSRATGIPARFSGSGSGTDFTLTISRLEPEDFAVYYCMQSIQPGWTFGQGTKVEIK

SEQ ID NO: 5194 - protein, 249 aa, synthetic construct
QVQLVESGGGVVQPGRSLRLSCAASGFTFSSYAMHWVRQAPGKGLEWVAVISYDGSNKYYADSVKGRFTISRDNSKNTLYLQMNSLRAEDTAVYYCAKDLTFARALDYWGQWGQGTLVTVSSGGSSRSSSSGGGGSGGGGEIVLTQSPATLSLSPGERATLSCRASQSVSSSYLAWYQQKPGQAPRLLIYGASSRATGIPARFSGSGSGTDFTLTISRLEPEDFAVYYCQAWDSSPDDVFGQGTKVEIK

SEQ ID NO: 5195 - protein, 248 aa, synthetic construct
QVQLVESGGGVVQPGRSLRLSCAASGFTFSSYAMHWVRQAPGKGLEWVAVISYDGSNKYYADSVKGRFTISRDNSKNTLYLQMNSLRAEDTAVYYCAKDLTFARALDYWGQWGQGTLVTVSSGGSSRSSSSGGGGSGGGGEIVLTQSPATLSLSPGERATLSCRASQSVSSSYLAWYQQKPGQAPRLLIYGASSRATGIPARFSGSGSGTDFTLTISRLEPEDFAVYYCQAYDSGNIVFGQGTKVEIK

SEQ ID NO: 5196 - protein, 248 aa, synthetic construct
QVQLVESGGGVVQPGRSLRLSCAASGFTFSSYAMHWVRQAPGKGLEWVAVISYDGSNKYYADSVKGRFTISRDNSKNTLYLQMNSLRAEDTAVYYCAKDLTFARALDYWGQWGQGTLVTVSSGGSSRSSSSGGGGSGGGGEIVLTQSPATLSLSPGERATLSCRASQSVSSSYLAWYQQKPGQAPRLLIYGASSRATGIPARFSGSGSGTDFTLTISRLEPEDFAVYYCQEWDSSIGVFGQGTKVEIK

SEQ ID NO: 5197 - protein, 251 aa, synthetic construct
QVQLVESGGGVVQPGRSLRLSCAASGFTFSSYAMHWVRQAPGKGLEWVAVISYDGSNKYYADSVKGRFTISRDNSKNTLYLQMNSLRAEDTAVYYCAKDLTFARALDYWGQWGQGTLVTVSSGGSSRSSSSGGGGSGGGGEIVLTQSPATLSLSPGERATLSCRASQSVSSSYLAWYQQKPGQAPRLLIYGASSRATGIPARFSGSGSGTDFTLTISRLEPEDFAVYYCQPYDSSSSGPYVFGQGTKVEIK

SEQ ID NO: 5198 - protein, 248 aa, synthetic construct
QVQLVESGGGVVQPGRSLRLSCAASGFTFSSYAMHWVRQAPGKGLEWVAVISYDGSNKYYADSVKGRFTISRDNSKNTLYLQMNSLRAEDTAVYYCAKDLTFARALDYWGQWGQGTLVTVSSGGSSRSSSSGGGGSGGGGEIVLTQSPATLSLSPGERATLSCRASQSVSSSYLAWYQQKPGQAPRLLIYGASSRATGIPARFSGSGSGTDFTLTISRLEPEDFAVYYCQQSYTPTYTFGQGTKVEIK

SEQ ID NO: 5199 - protein, 249 aa, synthetic construct
QVQLVESGGGVVQPGRSLRLSCAASGFTFSSYAMHWVRQAPGKGLEWVAVISYDGSNKYYADSVKGRFTISRDNSKNTLYLQMNSLRAEDTAVYYCAKDLTFARALDYWGQWGQGTLVTVSSGGSSRSSSSGGGGSGGGGEIVLTQSPATLSLSPGERATLSCRASQSVSSSYLAWYQQKPGQAPRLLIYGASSRATGIPARFSGSGSGTDFTLTISRLEPEDFAVYYCQQYNNWPPYTFGQGTKVEIK

SEQ ID NO: 5200 - protein, 250 aa, synthetic construct
QVQLVESGGGVVQPGRSLRLSCAASGFTFSSYAMHWVRQAPGKGLEWVAVISYDGSNKYYADSVKGRFTISRDNSKNTLYLQMNSLRAEDTAVYYCAKDLTFARALDYWGQWGQGTLVTVSSGGSSRSSSSGGGGSGGGGEIVLTQSPATLSLSPGERATLSCRASQSVSSSYLAWYQQKPGQAPRLLIYGASSRATGIPARFSGSGSGTDFTLTISRLEPEDFAVYYCQSYDNTLRGSIFGQGTKVEIK

SEQ ID NO: 5201 - protein, 250 aa, synthetic construct
QVQLVESGGGVVQPGRSLRLSCAASGFTFSSYAMHWVRQAPGKGLEWVAVISYDGSNKYYADSVKGRFTISRDNSKNTLYLQMNSLRAEDTAVYYCAKDLTFARALDYWGQWGQGTLVTVSSGGSSRSSSSGGGGSGGGGEIVLTQSPATLSLSPGERATLSCRASQSVSSSYLAWYQQKPGQAPRLLIYGASSRATGIPARFSGSGSGTDFTLTISRLEPEDFAVYYCQSYDSSLSAYVFGQGTKVEIK

SEQ ID NO: 5202 - protein, 250 aa, synthetic construct
QVQLVESGGGVVQPGRSLRLSCAASGFTFSSYAMHWVRQAPGKGLEWVAVISYDGSNKYYADSVKGRFTISRDNSKNTLYLQMNSLRAEDTAVYYCAKDLTFARALDYWGQWGQGTLVTVSSGGSSRSSSSGGGGSGGGGEIVLTQSPATLSLSPGERATLSCRASQSVSSSYLAWYQQKPGQAPRLLIYGASSRATGIPARFSGSGSGTDFTLTISRLEPEDFAVYYCQSYDTSRGIKVFGQGTKVEIK

SEQ ID NO: 5203 - protein, 248 aa, synthetic construct
QVQLVESGGGVVQPGRSLRLSCAASGFTFSSYAMHWVRQAPGKGLEWVAVISYDGSNKYYADSVKGRFTISRDNSKNTLYLQMNSLRAEDTAVYYCAKDLTFARALDYWGQWGQGTLVTVSSGGSSRSSSSGGGGSGGGGEIVLTQSPATLSLSPGERATLSCRASQSVSSSYLAWYQQKPGQAPRLLIYGASSRATGIPARFSGSGSGTDFTLTISRLEPEDFAVYYCQTWDSSTGVFGQGTKVEIK

SEQ ID NO: 5204 - protein, 252 aa, synthetic construct
QVQLVESGGGVVQPGRSLRLSCAASGFTFSSYAMHWVRQAPGKGLEWVAVISYDGSNKYYADSVKGRFTISRDNSKNTLYLQMNSLRAEDTAVYYCAKDLTFARALDYWGQWGQGTLVTVSSGGSSRSSSSGGGGSGGGGEIVLTQSPATLSLSPGERATLSCRASQSVSSSYLAWYQQKPGQAPRLLIYGASSRATGIPARFSGSGSGTDFTLTISRLEPEDFAVYYCQVWDSSSDHPSWVFGQGTKVEIK

SEQ ID NO: 5205 - protein, 250 aa, synthetic construct
QVQLVESGGGVVQPGRSLRLSCAASGFTFSSYAMHWVRQAPGKGLEWVAVISYDGSNKYYADSVKGRFTISRDNSKNTLYLQMNSLRAEDTAVYYCAKDLTFARALDYWGQWGQGTLVTVSSGGSSRSSSSGGGGSGGGGEIVLTQSPATLSLSPGERATLSCRASQSVSSSYLAWYQQKPGQAPRLLIYGASSRATGIPARFSGSGSGTDFTLTISRLEPEDFAVYYCSSYTSSSTEGVFGQGTKVEIK

SEQ ID NO: 5206 - protein, 251 aa, synthetic construct
QVQLVESGGGVVQPGRSLRLSCAASGFTFSSYAMHWVRQAPGKGLEWVAVISYDGSNKYYADSVKGRFTISRDNSKNTLYLQMNSLRAEDTAVYYCAKDLTQLYFAFDYWGQWGQGTLVTVSSGGSSRSSSSGGGGSGGGGEIVLTQSPATLSLSPGERATLSCRASQSVSSSYLAWYQQKPGQAPRLLIYGASSRATGIPARFSGSGSGTDFTLTISRLEPEDFAVYYCQTWGTGTWGWVFGQGTKVEIK

SEQ ID NO: 5207 - protein, 250 aa, synthetic construct
QVQLVESGGGVVQPGRSLRLSCAASGFTFSSYAMHWVRQAPGKGLEWVAVISYDGSNKYYADSVKGRFTISRDNSKNTLYLQMNSLRAEDTAVYYCAKDLVTGSLDYWGQWGQGTLVTVSSGGSSRSSSSGGGGSGGGGEIVLTQSPATLSLSPGERATLSCRASQSVSSSYLAWYQQKPGQAPRLLIYGASSRATGIPARFSGSGSGTDFTLTISRLEPEDFAVYYCQQRSNWPPPAFTFGQGTKVEIK

SEQ ID NO: 5208 - protein, 253 aa, synthetic construct
QVQLVESGGGVVQPGRSLRLSCAASGFTFSSYAMHWVRQAPGKGLEWVAVISYDGSNKYYADSVKGRFTISRDNSKNTLYLQMNSLRAEDTAVYYCAKDQEGYRAYGYNGMDVWGQWGQGTLVTVSSGGSSRSSSSGGGGSGGGGEIVLTQSPATLSLSPGERATLSCRASQSVSSSYLAWYQQKPGQAPRLLIYGASSRATGIPARFSGSGSGTDFTLTISRLEPEDFAVYYCQQANSTPLTFGQGTKVEIK

SEQ ID NO: 5209 - protein, 253 aa, synthetic construct
QVQLVESGGGVVQPGRSLRLSCAASGFTFSSYAMHWVRQAPGKGLEWVAVISYDGSNKYYADSVKGRFTISRDNSKNTLYLQMNSLRAEDTAVYYCAKDQEGYRAYGYNGMDVWGQWGQGTLVTVSSGGSSRSSSSGGGGSGGGGEIVLTQSPATLSLSPGERATLSCRASQSVSSSYLAWYQQKPGQAPRLLIYGASSRATGIPARFSGSGSGTDFTLTISRLEPEDFAVYYCQSYDANNVVFGQGTKVEIK

SEQ ID NO: 5210 - protein, 249 aa, synthetic construct
QVQLVESGGGVVQPGRSLRLSCAASGFTFSSYAMHWVRQAPGKGLEWVAVISYDGSNKYYADSVKGRFTISRDNSKNTLYLQMNSLRAEDTAVYYCAKDQSGTIALDYWGQWGQGTLVTVSSGGSSRSSSSGGGGSGGGGEIVLTQSPATLSLSPGERATLSCRASQSVSSSYLAWYQQKPGQAPRLLIYGASSRATGIPARFSGSGSGTDFTLTISRLEPEDFAVYYCSSYTSSSPVVFGQGTKVEIK

SEQ ID NO: 5211 - protein, 250 aa, synthetic construct
QVQLVESGGGVVQPGRSLRLSCAASGFTFSSYAMHWVRQAPGKGLEWVAVISYDGSNKYYADSVKGRFTISRDNSKNTLYLQMNSLRAEDTAVYYCAKDRRGAGYYYFDHWGQWGQGTLVTVSSGGSSRSSSSGGGGSGGGGEIVLTQSPATLSLSPGERATLSCRASQSVSSSYLAWYQQKPGQAPRLLIYGASSRATGIPARFSGSGSGTDFTLTISRLEPEDFAVYYCQQYYGSPLTFGQGTKVEIK

SEQ ID NO: 5212 - protein, 249 aa, synthetic construct
QVQLVESGGGVVQPGRSLRLSCAASGFTFSSYAMHWVRQAPGKGLEWVAVISYDGSNKYYADSVKGRFTISRDNSKNTLYLQMNSLRAEDTAVYYCAKDSAAAAADYWGQWGQGTLVTVSSGGSSRSSSSGGGGSGGGGEIVLTQSPATLSLSPGERATLSCRASQSVSSSYLAWYQQKPGQAPRLLIYGASSRATGIPARFSGSGSGTDFTLTISRLEPEDFAVYYCSSYTNTNTLVVFGQGTKVEIK

SEQ ID NO: 5213 - protein, 254 aa, synthetic construct
QVQLVESGGGVVQPGRSLRLSCAASGFTFSSYAMHWVRQAPGKGLEWVAVISYDGSNKYYADSVKGRFTISRDNSKNTLYLQMNSLRAEDTAVYYCAKDTSRYSLAFGFGDFWGQWGQGTLVTVSSGGSSRSSSSGGGGSGGGGEIVLTQSPATLSLSPGERATLSCRASQSVSSSYLAWYQQKPGQAPRLLIYGASSRATGIPARFSGSGSGTDFTLTISRLEPEDFAVYYCSSYTSSSPYVVFGQGTKVEIK

SEQ ID NO: 5214 - protein, 257 aa, synthetic construct
QVQLVESGGGVVQPGRSLRLSCAASGFTFSSYAMHWVRQAPGKGLEWVAVISYDGSNKYYADSVKGRFTISRDNSKNTLYLQMNSLRAEDTAVYYCAKDWGWYRGYGHAGAVDIWGQWGQGTLVTVSSGGSSRSSSSGGGGSGGGGEIVLTQSPATLSLSPGERATLSCRASQSVSSSYLAWYQQKPGQAPRLLIYGASSRATGIPARFSGSGSGTDFTLTISRLEPEDFAVYYCAAWDDSLNGHYVFGQGTKVEIK

SEQ ID NO: 5215 - protein, 256 aa, synthetic construct
QVQLVESGGGVVQPGRSLRLSCAASGFTFSSYAMHWVRQAPGKGLEWVAVISYDGSNKYYADSVKGRFTISRDNSKNTLYLQMNSLRAEDTAVYYCAKDWGWYRGYGHAGAVDIWGQWGQGTLVTVSSGGSSRSSSSGGGGSGGGGEIVLTQSPATLSLSPGERATLSCRASQSVSSSYLAWYQQKPGQAPRLLIYGASSRATGIPARFSGSGSGTDFTLTISRLEPEDFAVYYCAEWADSLSGGVFGQGTKVEIK

SEQ ID NO: 5216 - protein, 257 aa, synthetic construct
QVQLVESGGGVVQPGRSLRLSCAASGFTFSSYAMHWVRQAPGKGLEWVAVISYDGSNKYYADSVKGRFTISRDNSKNTLYLQMNSLRAEDTAVYYCAKDWGWYRGYGHAGAVDIWGQWGQGTLVTVSSGGSSRSSSSGGGGSGGGGEIVLTQSPATLSLSPGERATLSCRASQSVSSSYLAWYQQKPGQAPRLLIYGASSRATGIPARFSGSGSGTDFTLTISRLEPEDFAVYYCEAWDDSLSGYVVFGQGTKVEIK

SEQ ID NO: 5217 - protein, 255 aa, synthetic construct
QVQLVESGGGVVQPGRSLRLSCAASGFTFSSYAMHWVRQAPGKGLEWVAVISYDGSNKYYADSVKGRFTISRDNSKNTLYLQMNSLRAEDTAVYYCAKDWGWYRGYGHAGAVDIWGQWGQGTLVTVSSGGSSRSSSSGGGGSGGGGEIVLTQSPATLSLSPGERATLSCRASQSVSSSYLAWYQQKPGQAPRLLIYGASSRATGIPARFSGSGSGTDFTLTISRLEPEDFAVYYCESYDSSRNVVFGQGTKVEIK

SEQ ID NO: 5218 - protein, 255 aa, synthetic construct
QVQLVESGGGVVQPGRSLRLSCAASGFTFSSYAMHWVRQAPGKGLEWVAVISYDGSNKYYADSVKGRFTISRDNSKNTLYLQMNSLRAEDTAVYYCAKDWGWYRGYGHAGAVDIWGQWGQGTLVTVSSGGSSRSSSSGGGGSGGGGEIVLTQSPATLSLSPGERATLSCRASQSVSSSYLAWYQQKPGQAPRLLIYGASSRATGIPARFSGSGSGTDFTLTISRLEPEDFAVYYCQAWDSNPAVVFGQGTKVEIK

SEQ ID NO: 5219 - protein, 254 aa, synthetic construct
QVQLVESGGGVVQPGRSLRLSCAASGFTFSSYAMHWVRQAPGKGLEWVAVISYDGSNKYYADSVKGRFTISRDNSKNTLYLQMNSLRAEDTAVYYCAKDWGWYRGYGHAGAVDIWGQWGQGTLVTVSSGGSSRSSSSGGGGSGGGGEIVLTQSPATLSLSPGERATLSCRASQSVSSSYLAWYQQKPGQAPRLLIYGASSRATGIPARFSGSGSGTDFTLTISRLEPEDFAVYYCQQYNNPLFTFGQGTKVEIK

SEQ ID NO: 5220 - protein, 254 aa, synthetic construct
QVQLVESGGGVVQPGRSLRLSCAASGFTFSSYAMHWVRQAPGKGLEWVAVISYDGSNKYYADSVKGRFTISRDNSKNTLYLQMNSLRAEDTAVYYCAKDWGWYRGYGHAGAVDIWGQWGQGTLVTVSSGGSSRSSSSGGGGSGGGGEIVLTQSPATLSLSPGERATLSCRASQSVSSSYLAWYQQKPGQAPRLLIYGASSRATGIPARFSGSGSGTDFTLTISRLEPEDFAVYYCQQYNSSLWTFGQGTKVEIK

SEQ ID NO: 5221 - protein, 254 aa, synthetic construct
QVQLVESGGGVVQPGRSLRLSCAASGFTFSSYAMHWVRQAPGKGLEWVAVISYDGSNKYYADSVKGRFTISRDNSKNTLYLQMNSLRAEDTAVYYCAKDWGWYRGYGHAGAVDIWGQWGQGTLVTVSSGGSSRSSSSGGGGSGGGGEIVLTQSPATLSLSPGERATLSCRASQSVSSSYLAWYQQKPGQAPRLLIYGASSRATGIPARFSGSGSGTDFTLTISRLEPEDFAVYYCQTWDSFGQVFGQGTKVEIK

SEQ ID NO: 5222 - protein, 255 aa, synthetic construct
QVQLVESGGGVVQPGRSLRLSCAASGFTFSSYAMHWVRQAPGKGLEWVAVISYDGSNKYYADSVKGRFTISRDNSKNTLYLQMNSLRAEDTAVYYCAKDWGWYRGYGHAGAVDIWGQWGQGTLVTVSSGGSSRSSSSGGGGSGGGGEIVLTQSPATLSLSPGERATLSCRASQSVSSSYLAWYQQKPGQAPRLLIYGASSRATGIPARFSGSGSGTDFTLTISRLEPEDFAVYYCSSYASNTHVKFGQGTKVEIK

SEQ ID NO: 5223 - protein, 256 aa, synthetic construct
QVQLVESGGGVVQPGRSLRLSCAASGFTFSSYAMHWVRQAPGKGLEWVAVISYDGSNKYYADSVKGRFTISRDNSKNTLYLQMNSLRAEDTAVYYCAKDWGWYRGYGHAGAVDIWGQWGQGTLVTVSSGGSSRSSSSGGGGSGGGGEIVLTQSPATLSLSPGERATLSCRASQSVSSSYLAWYQQKPGQAPRLLIYGASSRATGIPARFSGSGSGTDFTLTISRLEPEDFAVYYCSSYTSSSTHVVFGQGTKVEIK

SEQ ID NO: 5224 - protein, 250 aa, synthetic construct
QVQLVESGGGVVQPGRSLRLSCAASGFTFSSYAMHWVRQAPGKGLEWVAVISYDGSNKYYADSVKGRFTISRDNSKNTLYLQMNSLRAEDTAVYYCAKETTGIGAFDYWGQWGQGTLVTVSSGGSSRSSSSGGGGSGGGGEIVLTQSPATLSLSPGERATLSCRASQSVSSSYLAWYQQKPGQAPRLLIYGASSRATGIPARFSGSGSGTDFTLTISRLEPEDFAVYYCQQRSNWWPAITFGQGTKVEIK

SEQ ID NO: 5225 - protein, 250 aa, synthetic construct
QVQLVESGGGVVQPGRSLRLSCAASGFTFSSYAMHWVRQAPGKGLEWVAVISYDGSNKYYADSVKGRFTISRDNSKNTLYLQMNSLRAEDTAVYYCAKETTGIGAFDYWGQWGQGTLVTVSSGGSSRSSSSGGGGSGGGGEIVLTQSPATLSLSPGERATLSCRASQSVSSSYLAWYQQKPGQAPRLLIYGASSRATGIPARFSGSGSGTDFTLTISRLEPEDFAVYYCQVWDSSSHHWVFGQGTKVEIK

SEQ ID NO: 5226 - protein, 248 aa, synthetic construct
QVQLVESGGGVVQPGRSLRLSCAASGFTFSSYAMHWVRQAPGKGLEWVAVISYDGSNKYYADSVKGRFTISRDNSKNTLYLQMNSLRAEDTAVYYCAKGFLSSALDYWGQWGQGTLVTVSSGGSSRSSSSGGGGSGGGGEIVLTQSPATLSLSPGERATLSCRASQSVSSSYLAWYQQKPGQAPRLLIYGASSRATGIPARFSGSGSGTDFTLTISRLEPEDFAVYYCQHYHNSVPVTFGQGTKVEIK

SEQ ID NO: 5227 - protein, 249 aa, synthetic construct
QVQLVESGGGVVQPGRSLRLSCAASGFTFSSYAMHWVRQAPGKGLEWVAVISYDGSNKYYADSVKGRFTISRDNSKNTLYLQMNSLRAEDTAVYYCAKGFLSSALDYWGQWGQGTLVTVSSGGSSRSSSSGGGGSGGGGEIVLTQSPATLSLSPGERATLSCRASQSVSSSYLAWYQQKPGQAPRLLIYGASSRATGIPARFSGSGSGTDFTLTISRLEPEDFAVYYCQQRSNWPPAFNFGQGTKVEIK

SEQ ID NO: 5228 - protein, 248 aa, synthetic construct
QVQLVESGGGVVQPGRSLRLSCAASGFTFSSYAMHWVRQAPGKGLEWVAVISYDGSNKYYADSVKGRFTISRDNSKNTLYLQMNSLRAEDTAVYYCAKGFLSSALDYWGQWGQGTLVTVSSGGSSRSSSSGGGGSGGGGEIVLTQSPATLSLSPGERATLSCRASQSVSSSYLAWYQQKPGQAPRLLIYGASSRATGIPARFSGSGSGTDFTLTISRLEPEDFAVYYCQQYGSPSGLTFGQGTKVEIK

SEQ ID NO: 5229 - protein, 251 aa, synthetic construct
QVQLVESGGGVVQPGRSLRLSCAASGFTFSSYAMHWVRQAPGKGLEWVAVISYDGSNKYYADSVKGRFTISRDNSKNTLYLQMNSLRAEDTAVYYCAKGGWAYIFDYWGQWGQGTLVTVSSGGSSRSSSSGGGGSGGGGEIVLTQSPATLSLSPGERATLSCRASQSVSSSYLAWYQQKPGQAPRLLIYGASSRATGIPARFSGSGSGTDFTLTISRLEPEDFAVYYCGTWDSSSGDGAGVFGQGTKVEIK

SEQ ID NO: 5230 - protein, 251 aa, synthetic construct
QVQLVESGGGVVQPGRSLRLSCAASGFTFSSYAMHWVRQAPGKGLEWVAVISYDGSNKYYADSVKGRFTISRDNSKNTLYLQMNSLRAEDTAVYYCAKGHSSTYVIDYWGQWGQGTLVTVSSGGSSRSSSSGGGGSGGGGEIVLTQSPATLSLSPGERATLSCRASQSVSSSYLAWYQQKPGQAPRLLIYGASSRATGIPARFSGSGSGTDFTLTISRLEPEDFAVYYCGTWDSSLSSAAVFGQGTKVEIK

SEQ ID NO: 5231 - protein, 249 aa, synthetic construct
QVQLVESGGGVVQPGRSLRLSCAASGFTFSSYAMHWVRQAPGKGLEWVAVISYDGSNKYYADSVKGRFTISRDNSKNTLYLQMNSLRAEDTAVYYCAKGSPSGLYSLDFWGQWGQGTLVTVSSGGSSRSSSSGGGGSGGGGEIVLTQSPATLSLSPGERATLSCRASQSVSSSYLAWYQQKPGQAPRLLIYGASSRATGIPARFSGSGSGTDFTLTISRLEPEDFAVYYCQQYNNGPITFGQGTKVEIK

SEQ ID NO: 5232 - protein, 250 aa, synthetic construct
QVQLVESGGGVVQPGRSLRLSCAASGFTFSSYAMHWVRQAPGKGLEWVAVISYDGSNKYYADSVKGRFTISRDNSKNTLYLQMNSLRAEDTAVYYCAKGYGPANAFDYWGQWGQGTLVTVSSGGSSRSSSSGGGGSGGGGEIVLTQSPATLSLSPGERATLSCRASQSVSSSYLAWYQQKPGQAPRLLIYGASSRATGIPARFSGSGSGTDFTLTISRLEPEDFAVYYCSSYTSSSSHLVFGQGTKVEIK

SEQ ID NO: 5233 - protein, 250 aa, synthetic construct
QVQLVESGGGVVQPGRSLRLSCAASGFTFSSYAMHWVRQAPGKGLEWVAVISYDGSNKYYADSVKGRFTISRDNSKNTLYLQMNSLRAEDTAVYYCAKMDSYYAYGLDFWGQWGQGTLVTVSSGGSSRSSSSGGGGSGGGGEIVLTQSPATLSLSPGERATLSCRASQSVSSSYLAWYQQKPGQAPRLLIYGASSRATGIPARFSGSGSGTDFTLTISRLEPEDFAVYYCSSYTSTNTLVFGQGTKVEIK

SEQ ID NO: 5234 - protein, 246 aa, synthetic construct
QVQLVESGGGVVQPGRSLRLSCAASGFTFSSYAMHWVRQAPGKGLEWVAVISYDGSNKYYADSVKGRFTISRDNSKNTLYLQMNSLRAEDTAVYYCAKQNAISLDYWGQWGQGTLVTVSSGGSSRSSSSGGGGSGGGGEIVLTQSPATLSLSPGERATLSCRASQSVSSSYLAWYQQKPGQAPRLLIYGASSRATGIPARFSGSGSGTDFTLTISRLEPEDFAVYYCMQGTHWHLAFGQGTKVEIK

SEQ ID NO: 5235 - protein, 247 aa, synthetic construct
QVQLVESGGGVVQPGRSLRLSCAASGFTFSSYAMHWVRQAPGKGLEWVAVISYDGSNKYYADSVKGRFTISRDNSKNTLYLQMNSLRAEDTAVYYCAKQNAISLDYWGQWGQGTLVTVSSGGSSRSSSSGGGGSGGGGEIVLTQSPATLSLSPGERATLSCRASQSVSSSYLAWYQQKPGQAPRLLIYGASSRATGIPARFSGSGSGTDFTLTISRLEPEDFAVYYCTTWDSLNGEVFGQGTKVEIK

SEQ ID NO: 5236 - protein, 248 aa, synthetic construct
QVQLVESGGGVVQPGRSLRLSCAASGFTFSSYAMHWVRQAPGKGLEWVAVISYDGSNKYYADSVKGRFTISRDNSKNTLYLQMNSLRAEDTAVYYCAKRANGHTTFDYWGQWGQGTLVTVSSGGSSRSSSSGGGGSGGGGEIVLTQSPATLSLSPGERATLSCRASQSVSSSYLAWYQQKPGQAPRLLIYGASSRATGIPARFSGSGSGTDFTLTISRLEPEDFAVYYCQTWGTGIRVFGQGTKVEIK

SEQ ID NO: 5237 - protein, 250 aa, synthetic construct
QVQLVESGGGVVQPGRSLRLSCAASGFTFSSYAMHWVRQAPGKGLEWVAVISYDGSNKYYADSVKGRFTISRDNSKNTLYLQMNSLRAEDTAVYYCAKRHDALWAFDYWGQWGQGTLVTVSSGGSSRSSSSGGGGSGGGGEIVLTQSPATLSLSPGERATLSCRASQSVSSSYLAWYQQKPGQAPRLLIYGASSRATGIPARFSGSGSGTDFTLTISRLEPEDFAVYYCGTWDSRMGAWVFGQGTKVEIK

SEQ ID NO: 5238 - protein, 253 aa, synthetic construct
QVQLVESGGGVVQPGRSLRLSCAASGFTFSSYAMHWVRQAPGKGLEWVAVISYDGSNKYYADSVKGRFTISRDNSKNTLYLQMNSLRAEDTAVYYCAKRPPISWGPAFDYWGQWGQGTLVTVSSGGSSRSSSSGGGGSGGGGEIVLTQSPATLSLSPGERATLSCRASQSVSSSYLAWYQQKPGQAPRLLIYGASSRATGIPARFSGSGSGTDFTLTISRLEPEDFAVYYCQAWDSSLNNLWVFGQGTKVEIK

SEQ ID NO: 5239 - protein, 261 aa, synthetic construct
QVQLVESGGGVVQPGRSLRLSCAASGFTFSSYAMHWVRQAPGKGLEWVAVISYDGSNKYYADSVKGRFTISRDNSKNTLYLQMNSLRAEDTAVYYCAKSDEYRAVGPYDYWSYAAFDYWGQWGQGTLVTVSSGGSSRSSSSGGGGSGGGGEIVLTQSPATLSLSPGERATLSCRASQSVSSSYLAWYQQKPGQAPRLLIYGASSRATGIPARFSGSGSGTDFTLTISRLEPEDFAVYYCQSYDSSLSGSYVFGQGTKVEIK

SEQ ID NO: 5240 - protein, 247 aa, synthetic construct
QVQLVESGGGVVQPGRSLRLSCAASGFTFSSYAMHWVRQAPGKGLEWVAVISYDGSNKYYADSVKGRFTISRDNSKNTLYLQMNSLRAEDTAVYYCAKSIGWIGLDYWGQWGQGTLVTVSSGGSSRSSSSGGGGSGGGGEIVLTQSPATLSLSPGERATLSCRASQSVSSSYLAWYQQKPGQAPRLLIYGASSRATGIPARFSGSGSGTDFTLTISRLEPEDFAVYYCQQYSSSLVAFGQGTKVEIK

SEQ ID NO: 5241 - protein, 248 aa, synthetic construct
QVQLVESGGGVVQPGRSLRLSCAASGFTFSSYAMHWVRQAPGKGLEWVAVISYDGSNKYYADSVKGRFTISRDNSKNTLYLQMNSLRAEDTAVYYCAKSLWGGFDYWGQWGQGTLVTVSSGGSSRSSSSGGGGSGGGGEIVLTQSPATLSLSPGERATLSCRASQSVSSSYLAWYQQKPGQAPRLLIYGASSRATGIPARFSGSGSGTDFTLTISRLEPEDFAVYYCQVWESSNHLVVFGQGTKVEIK

SEQ ID NO: 5242 - protein, 254 aa, synthetic construct
QVQLVESGGGVVQPGRSLRLSCAASGFTFSSYAMHWVRQAPGKGLEWVAVISYDGSNKYYADSVKGRFTISRDNSKNTLYLQMNSLRAEDTAVYYCAKYVYYGSYLRYAMDPWGQWGQGTLVTVSSGGSSRSSSSGGGGSGGGGEIVLTQSPATLSLSPGERATLSCRASQSVSSSYLAWYQQKPGQAPRLLIYGASSRATGIPARFSGSGSGTDFTLTISRLEPEDFAVYYCAASDDSLNSWVFGQGTKVEIK

SEQ ID NO: 5243 - protein, 251 aa, synthetic construct
QVQLVESGGGVVQPGRSLRLSCAASGFTFSSYAMHWVRQAPGKGLEWVAVISYDGSNKYYADSVKGRFTISRDNSKNTLYLQMNSLRAEDTAVYYCARAGGSGSFYRLFDYWGQWGQGTLVTVSSGGSSRSSSSGGGGSGGGGEIVLTQSPATLSLSPGERATLSCRASQSVSSSYLAWYQQKPGQAPRLLIYGASSRATGIPARFSGSGSGTDFTLTISRLEPEDFAVYYCQQSYGIPLTFGQGTKVEIK

SEQ ID NO: 5244 - protein, 245 aa, synthetic construct
QVQLVESGGGVVQPGRSLRLSCAASGFTFSSYAMHWVRQAPGKGLEWVAVISYDGSNKYYADSVKGRFTISRDNSKNTLYLQMNSLRAEDTAVYYCARASADDYWGQWGQGTLVTVSSGGSSRSSSSGGGGSGGGGEIVLTQSPATLSLSPGERATLSCRASQSVSSSYLAWYQQKPGQAPRLLIYGASSRATGIPARFSGSGSGTDFTLTISRLEPEDFAVYYCSSYTSSSLRVFGQGTKVEIK

SEQ ID NO: 5245 - protein, 248 aa, synthetic construct
QVQLVESGGGVVQPGRSLRLSCAASGFTFSSYAMHWVRQAPGKGLEWVAVISYDGSNKYYADSVKGRFTISRDNSKNTLYLQMNSLRAEDTAVYYCARAYTGRSGLDYWGQWGQGTLVTVSSGGSSRSSSSGGGGSGGGGEIVLTQSPATLSLSPGERATLSCRASQSVSSSYLAWYQQKPGQAPRLLIYGASSRATGIPARFSGSGSGTDFTLTISRLEPEDFAVYYCQQYYSTPFPFGQGTKVEIK

SEQ ID NO: 5246 - protein, 249 aa, synthetic construct
QVQLVESGGGVVQPGRSLRLSCAASGFTFSSYAMHWVRQAPGKGLEWVAVISYDGSNKYYADSVKGRFTISRDNSKNTLYLQMNSLRAEDTAVYYCARDARYVPDDGWGQWGQGTLVTVSSGGSSRSSSSGGGGSGGGGEIVLTQSPATLSLSPGERATLSCRASQSVSSSYLAWYQQKPGQAPRLLIYGASSRATGIPARFSGSGSGTDFTLTISRLEPEDFAVYYCQVWDSSSDHVVFGQGTKVEIK

SEQ ID NO: 5247 - protein, 254 aa, synthetic construct
QVQLVESGGGVVQPGRSLRLSCAASGFTFSSYAMHWVRQAPGKGLEWVAVISYDGSNKYYADSVKGRFTISRDNSKNTLYLQMNSLRAEDTAVYYCARDDSYRGPLHGYFDYWGQWGQGTLVTVSSGGSSRSSSSGGGGSGGGGEIVLTQSPATLSLSPGERATLSCRASQSVSSSYLAWYQQKPGQAPRLLIYGASSRATGIPARFSGSGSGTDFTLTISRLEPEDFAVYYCGAWETSLSGGVFGQGTKVEIK

SEQ ID NO: 5248 - protein, 254 aa, synthetic construct
QVQLVESGGGVVQPGRSLRLSCAASGFTFSSYAMHWVRQAPGKGLEWVAVISYDGSNKYYADSVKGRFTISRDNSKNTLYLQMNSLRAEDTAVYYCARDDSYRGPLHGYFDYWGQWGQGTLVTVSSGGSSRSSSSGGGGSGGGGEIVLTQSPATLSLSPGERATLSCRASQSVSSSYLAWYQQKPGQAPRLLIYGASSRATGIPARFSGSGSGTDFTLTISRLEPEDFAVYYCQVWDSSSDHGVFGQGTKVEIK

SEQ ID NO: 5249 - protein, 259 aa, synthetic construct
QVQLVESGGGVVQPGRSLRLSCAASGFTFSSYAMHWVRQAPGKGLEWVAVISYDGSNKYYADSVKGRFTISRDNSKNTLYLQMNSLRAEDTAVYYCARDGLGYRNLFGSHVSRWFDVWGQWGQGTLVTVSSGGSSRSSSSGGGGSGGGGEIVLTQSPATLSLSPGERATLSCRASQSVSSSYLAWYQQKPGQAPRLLIYGASSRATGIPARFSGSGSGTDFTLTISRLEPEDFAVYYCQSYDSSLSDVVFGQGTKVEIK

SEQ ID NO: 5250 - protein, 258 aa, synthetic construct
QVQLVESGGGVVQPGRSLRLSCAASGFTFSSYAMHWVRQAPGKGLEWVAVISYDGSNKYYADSVKGRFTISRDNSKNTLYLQMNSLRAEDTAVYYCARDGYFYRRNVTTYYSSYMDYWGQWGQGTLVTVSSGGSSRSSSSGGGGSGGGGEIVLTQSPATLSLSPGERATLSCRASQSVSSSYLAWYQQKPGQAPRLLIYGASSRATGIPARFSGSGSGTDFTLTISRLEPEDFAVYYCQAWDSRSLVVFGQGTKVEIK

SEQ ID NO: 5251 - protein, 257 aa, synthetic construct
QVQLVESGGGVVQPGRSLRLSCAASGFTFSSYAMHWVRQAPGKGLEWVAVISYDGSNKYYADSVKGRFTISRDNSKNTLYLQMNSLRAEDTAVYYCARDGYFYRRNVTTYYSSYMDYWGQWGQGTLVTVSSGGSSRSSSSGGGGSGGGGEIVLTQSPATLSLSPGERATLSCRASQSVSSSYLAWYQQKPGQAPRLLIYGASSRATGIPARFSGSGSGTDFTLTISRLEPEDFAVYYCQQAKSFPLTFGQGTKVEIK

SEQ ID NO: 5252 - protein, 257 aa, synthetic construct
QVQLVESGGGVVQPGRSLRLSCAASGFTFSSYAMHWVRQAPGKGLEWVAVISYDGSNKYYADSVKGRFTISRDNSKNTLYLQMNSLRAEDTAVYYCARDGYFYRRNVTTYYSSYMDYWGQWGQGTLVTVSSGGSSRSSSSGGGGSGGGGEIVLTQSPATLSLSPGERATLSCRASQSVSSSYLAWYQQKPGQAPRLLIYGASSRATGIPARFSGSGSGTDFTLTISRLEPEDFAVYYCQQYCASPQTFGQGTKVEIK

SEQ ID NO: 5253 - protein, 259 aa, synthetic construct
QVQLVESGGGVVQPGRSLRLSCAASGFTFSSYAMHWVRQAPGKGLEWVAVISYDGSNKYYADSVKGRFTISRDNSKNTLYLQMNSLRAEDTAVYYCARDGYFYRRNVTTYYSSYMDYWGQWGQGTLVTVSSGGSSRSSSSGGGGSGGGGEIVLTQSPATLSLSPGERATLSCRASQSVSSSYLAWYQQKPGQAPRLLIYGASSRATGIPARFSGSGSGTDFTLTISRLEPEDFAVYYCQQYGSWPLAVTFGQGTKVEIK

SEQ ID NO: 5254 - protein, 259 aa, synthetic construct
QVQLVESGGGVVQPGRSLRLSCAASGFTFSSYAMHWVRQAPGKGLEWVAVISYDGSNKYYADSVKGRFTISRDNSKNTLYLQMNSLRAEDTAVYYCARDGYFYRRNVTTYYSSYMDYWGQWGQGTLVTVSSGGSSRSSSSGGGGSGGGGEIVLTQSPATLSLSPGERATLSCRASQSVSSSYLAWYQQKPGQAPRLLIYGASSRATGIPARFSGSGSGTDFTLTISRLEPEDFAVYYCQVWDSSTDLVVFGQGTKVEIK

SEQ ID NO: 5255 - protein, 250 aa, synthetic construct
QVQLVESGGGVVQPGRSLRLSCAASGFTFSSYAMHWVRQAPGKGLEWVAVISYDGSNKYYADSVKGRFTISRDNSKNTLYLQMNSLRAEDTAVYYCARDHRLVPVAAQLYWGQWGQGTLVTVSSGGSSRSSSSGGGGSGGGGEIVLTQSPATLSLSPGERATLSCRASQSVSSSYLAWYQQKPGQAPRLLIYGASSRATGIPARFSGSGSGTDFTLTISRLEPEDFAVYYCQQSYSPPITFGQGTKVEIK

SEQ ID NO: 5256 - protein, 248 aa, synthetic construct
QVQLVESGGGVVQPGRSLRLSCAASGFTFSSYAMHWVRQAPGKGLEWVAVISYDGSNKYYADSVKGRFTISRDNSKNTLYLQMNSLRAEDTAVYYCARDLHYYVAMDVWGQWGQGTLVTVSSGGSSRSSSSGGGGSGGGGEIVLTQSPATLSLSPGERATLSCRASQSVSSSYLAWYQQKPGQAPRLLIYGASSRATGIPARFSGSGSGTDFTLTISRLEPEDFAVYYCMQGTHPPPTFGQGTKVEIK

SEQ ID NO: 5257 - protein, 256 aa, synthetic construct
QVQLVESGGGVVQPGRSLRLSCAASGFTFSSYAMHWVRQAPGKGLEWVAVISYDGSNKYYADSVKGRFTISRDNSKNTLYLQMNSLRAEDTAVYYCARDLRGYRGGGTYDAFDVWGQWGQGTLVTVSSGGSSRSSSSGGGGSGGGGEIVLTQSPATLSLSPGERATLSCRASQSVSSSYLAWYQQKPGQAPRLLIYGASSRATGIPARFSGSGSGTDFTLTISRLEPEDFAVYYCGTWDSSLSAGVFGQGTKVEIK

SEQ ID NO: 5258 - protein, 248 aa, synthetic construct
QVQLVESGGGVVQPGRSLRLSCAASGFTFSSYAMHWVRQAPGKGLEWVAVISYDGSNKYYADSVKGRFTISRDNSKNTLYLQMNSLRAEDTAVYYCARDPSGHGMDVWGQWGQGTLVTVSSGGSSRSSSSGGGGSGGGGEIVLTQSPATLSLSPGERATLSCRASQSVSSSYLAWYQQKPGQAPRLLIYGASSRATGIPARFSGSGSGTDFTLTISRLEPEDFAVYYCQAWDSTSPWVFGQGTKVEIK

SEQ ID NO: 5259 - protein, 248 aa, synthetic construct
QVQLVESGGGVVQPGRSLRLSCAASGFTFSSYAMHWVRQAPGKGLEWVAVISYDGSNKYYADSVKGRFTISRDNSKNTLYLQMNSLRAEDTAVYYCARDPSGSLDYWGQWGQGTLVTVSSGGSSRSSSSGGGGSGGGGEIVLTQSPATLSLSPGERATLSCRASQSVSSSYLAWYQQKPGQAPRLLIYGASSRATGIPARFSGSGSGTDFTLTISRLEPEDFAVYYCQVWQGTNSLVVFGQGTKVEIK

SEQ ID NO: 5260 - protein, 260 aa, synthetic construct
QVQLVESGGGVVQPGRSLRLSCAASGFTFSSYAMHWVRQAPGKGLEWVAVISYDGSNKYYADSVKGRFTISRDNSKNTLYLQMNSLRAEDTAVYYCARDPTGYRLSSLYYYAGFAYGMDVWGQWGQGTLVTVSSGGSSRSSSSGGGGSGGGGEIVLTQSPATLSLSPGERATLSCRASQSVSSSYLAWYQQKPGQAPRLLIYGASSRATGIPARFSGSGSGTDFTLTISRLEPEDFAVYYCETWDSNTQVFGQGTKVEIK

SEQ ID NO: 5261 - protein, 255 aa, synthetic construct
QVQLVESGGGVVQPGRSLRLSCAASGFTFSSYAMHWVRQAPGKGLEWVAVISYDGSNKYYADSVKGRFTISRDNSKNTLYLQMNSLRAEDTAVYYCARDQTYYDSSLSYGYAFDIWGQWGQGTLVTVSSGGSSRSSSSGGGGSGGGGEIVLTQSPATLSLSPGERATLSCRASQSVSSSYLAWYQQKPGQAPRLLIYGASSRATGIPARFSGSGSGTDFTLTISRLEPEDFAVYYCETWDSNTRVFGQGTKVEIK

SEQ ID NO: 5262 - protein, 255 aa, synthetic construct
QVQLVESGGGVVQPGRSLRLSCAASGFTFSSYAMHWVRQAPGKGLEWVAVISYDGSNKYYADSVKGRFTISRDNSKNTLYLQMNSLRAEDTAVYYCARDRGYRGYYAGNWFDPWGQWGQGTLVTVSSGGSSRSSSSGGGGSGGGGEIVLTQSPATLSLSPGERATLSCRASQSVSSSYLAWYQQKPGQAPRLLIYGASSRATGIPARFSGSGSGTDFTLTISRLEPEDFAVYYCGTWDSSLSSGVFGQGTKVEIK

SEQ ID NO: 5263 - protein, 256 aa, synthetic construct
QVQLVESGGGVVQPGRSLRLSCAASGFTFSSYAMHWVRQAPGKGLEWVAVISYDGSNKYYADSVKGRFTISRDNSKNTLYLQMNSLRAEDTAVYYCARDRGYRGYYAGNWFDPWGQWGQGTLVTVSSGGSSRSSSSGGGGSGGGGEIVLTQSPATLSLSPGERATLSCRASQSVSSSYLAWYQQKPGQAPRLLIYGASSRATGIPARFSGSGSGTDFTLTISRLEPEDFAVYYCGVWDSSSDHSVVFGQGTKVEIK

SEQ ID NO: 5264 - protein, 248 aa, synthetic construct
QVQLVESGGGVVQPGRSLRLSCAASGFTFSSYAMHWVRQAPGKGLEWVAVISYDGSNKYYADSVKGRFTISRDNSKNTLYLQMNSLRAEDTAVYYCARDRIVPAGSDYWGQWGQGTLVTVSSGGSSRSSSSGGGGSGGGGEIVLTQSPATLSLSPGERATLSCRASQSVSSSYLAWYQQKPGQAPRLLIYGASSRATGIPARFSGSGSGTDFTLTISRLEPEDFAVYYCQQRYSPNFTFGQGTKVEIK

SEQ ID NO: 5265 - protein, 248 aa, synthetic construct
QVQLVESGGGVVQPGRSLRLSCAASGFTFSSYAMHWVRQAPGKGLEWVAVISYDGSNKYYADSVKGRFTISRDNSKNTLYLQMNSLRAEDTAVYYCARDRIVPAGSDYWGQWGQGTLVTVSSGGSSRSSSSGGGGSGGGGEIVLTQSPATLSLSPGERATLSCRASQSVSSSYLAWYQQKPGQAPRLLIYGASSRATGIPARFSGSGSGTDFTLTISRLEPEDFAVYYCQQYYRASQSFGQGTKVEIK

SEQ ID NO: 5266 - protein, 250 aa, synthetic construct
QVQLVESGGGVVQPGRSLRLSCAASGFTFSSYAMHWVRQAPGKGLEWVAVISYDGSNKYYADSVKGRFTISRDNSKNTLYLQMNSLRAEDTAVYYCARDRKDFRMDVWGQWGQGTLVTVSSGGSSRSSSSGGGGSGGGGEIVLTQSPATLSLSPGERATLSCRASQSVSSSYLAWYQQKPGQAPRLLIYGASSRATGIPARFSGSGSGTDFTLTISRLEPEDFAVYYCGTWDNSLNTGGVFGQGTKVEIK

SEQ ID NO: 5267 - protein, 249 aa, synthetic construct
QVQLVESGGGVVQPGRSLRLSCAASGFTFSSYAMHWVRQAPGKGLEWVAVISYDGSNKYYADSVKGRFTISRDNSKNTLYLQMNSLRAEDTAVYYCARDRKSTPPDYWGQWGQGTLVTVSSGGSSRSSSSGGGGSGGGGEIVLTQSPATLSLSPGERATLSCRASQSVSSSYLAWYQQKPGQAPRLLIYGASSRATGIPARFSGSGSGTDFTLTISRLEPEDFAVYYCSSYDSSSGNKVFGQGTKVEIK

SEQ ID NO: 5268 - protein, 247 aa, synthetic construct
QVQLVESGGGVVQPGRSLRLSCAASGFTFSSYAMHWVRQAPGKGLEWVAVISYDGSNKYYADSVKGRFTISRDNSKNTLYLQMNSLRAEDTAVYYCARDRRDLTLDYWGQWGQGTLVTVSSGGSSRSSSSGGGGSGGGGEIVLTQSPATLSLSPGERATLSCRASQSVSSSYLAWYQQKPGQAPRLLIYGASSRATGIPARFSGSGSGTDFTLTISRLEPEDFAVYYCQAWDSSDVVFGQGTKVEIK

SEQ ID NO: 5269 - protein, 249 aa, synthetic construct
QVQLVESGGGVVQPGRSLRLSCAASGFTFSSYAMHWVRQAPGKGLEWVAVISYDGSNKYYADSVKGRFTISRDNSKNTLYLQMNSLRAEDTAVYYCARDRRDLTLDYWGQWGQGTLVTVSSGGSSRSSSSGGGGSGGGGEIVLTQSPATLSLSPGERATLSCRASQSVSSSYLAWYQQKPGQAPRLLIYGASSRATGIPARFSGSGSGTDFTLTISRLEPEDFAVYYCQVWDSSHDGVVFGQGTKVEIK

SEQ ID NO: 5270 - protein, 264 aa, synthetic construct
QVQLVESGGGVVQPGRSLRLSCAASGFTFSSYAMHWVRQAPGKGLEWVAVISYDGSNKYYADSVKGRFTISRDNSKNTLYLQMNSLRAEDTAVYYCARDSGGYRSPVYYDYYYRESDRYGMDVWGQWGQGTLVTVSSGGSSRSSSSGGGGSGGGGEIVLTQSPATLSLSPGERATLSCRASQSVSSSYLAWYQQKPGQAPRLLIYGASSRATGIPARFSGSGSGTDFTLTISRLEPEDFAVYYCQQALSSSPWTFGQGTKVEIK

SEQ ID NO: 5271 - protein, 259 aa, synthetic construct
QVQLVESGGGVVQPGRSLRLSCAASGFTFSSYAMHWVRQAPGKGLEWVAVISYDGSNKYYADSVKGRFTISRDNSKNTLYLQMNSLRAEDTAVYYCARDSGGYRTSGPYFQGYAMDVWGQWGQGTLVTVSSGGSSRSSSSGGGGSGGGGEIVLTQSPATLSLSPGERATLSCRASQSVSSSYLAWYQQKPGQAPRLLIYGASSRATGIPARFSGSGSGTDFTLTISRLEPEDFAVYYCEAWHDSGSGFVFGQGTKVEIK

SEQ ID NO: 5272 - protein, 258 aa, synthetic construct
QVQLVESGGGVVQPGRSLRLSCAASGFTFSSYAMHWVRQAPGKGLEWVAVISYDGSNKYYADSVKGRFTISRDNSKNTLYLQMNSLRAEDTAVYYCARDSGGYRTSGPYFQGYAMDVWGQWGQGTLVTVSSGGSSRSSSSGGGGSGGGGEIVLTQSPATLSLSPGERATLSCRASQSVSSSYLAWYQQKPGQAPRLLIYGASSRATGIPARFSGSGSGTDFTLTISRLEPEDFAVYYCQQSYSTPRPTFGQGTKVEIK

SEQ ID NO: 5273 - protein, 259 aa, synthetic construct
QVQLVESGGGVVQPGRSLRLSCAASGFTFSSYAMHWVRQAPGKGLEWVAVISYDGSNKYYADSVKGRFTISRDNSKNTLYLQMNSLRAEDTAVYYCARDSGGYRTSGPYFQGYAMDVWGQWGQGTLVTVSSGGSSRSSSSGGGGSGGGGEIVLTQSPATLSLSPGERATLSCRASQSVSSSYLAWYQQKPGQAPRLLIYGASSRATGIPARFSGSGSGTDFTLTISRLEPEDFAVYYCQVWDRSSSHVVFGQGTKVEIK

SEQ ID NO: 5274 - protein, 259 aa, synthetic construct
QVQLVESGGGVVQPGRSLRLSCAASGFTFSSYAMHWVRQAPGKGLEWVAVISYDGSNKYYADSVKGRFTISRDNSKNTLYLQMNSLRAEDTAVYYCARDSGGYRTSGPYFQGYAMDVWGQWGQGTLVTVSSGGSSRSSSSGGGGSGGGGEIVLTQSPATLSLSPGERATLSCRASQSVSSSYLAWYQQKPGQAPRLLIYGASSRATGIPARFSGSGSGTDFTLTISRLEPEDFAVYYCQVWDSSSDHPVFGQGTKVEIK

SEQ ID NO: 5275 - protein, 249 aa, synthetic construct
QVQLVESGGGVVQPGRSLRLSCAASGFTFSSYAMHWVRQAPGKGLEWVAVISYDGSNKYYADSVKGRFTISRDNSKNTLYLQMNSLRAEDTAVYYCARDSTIYSTDVWGQWGQGTLVTVSSGGSSRSSSSGGGGSGGGGEIVLTQSPATLSLSPGERATLSCRASQSVSSSYLAWYQQKPGQAPRLLIYGASSRATGIPARFSGSGSGTDFTLTISRLEPEDFAVYYCSSYTNTNTLVVFGQGTKVEIK

SEQ ID NO: 5276 - protein, 252 aa, synthetic construct
QVQLVESGGGVVQPGRSLRLSCAASGFTFSSYAMHWVRQAPGKGLEWVAVISYDGSNKYYADSVKGRFTISRDNSKNTLYLQMNSLRAEDTAVYYCAREPYRVRLFRYMDYWGQWGQGTLVTVSSGGSSRSSSSGGGGSGGGGEIVLTQSPATLSLSPGERATLSCRASQSVSSSYLAWYQQKPGQAPRLLIYGASSRATGIPARFSGSGSGTDFTLTISRLEPEDFAVYYCQAWDSSDHYVFGQGTKVEIK

SEQ ID NO: 5277 - protein, 252 aa, synthetic construct
QVQLVESGGGVVQPGRSLRLSCAASGFTFSSYAMHWVRQAPGKGLEWVAVISYDGSNKYYADSVKGRFTISRDNSKNTLYLQMNSLRAEDTAVYYCAREQYYSSSGALAFDIWGQWGQGTLVTVSSGGSSRSSSSGGGGSGGGGEIVLTQSPATLSLSPGERATLSCRASQSVSSSYLAWYQQKPGQAPRLLIYGASSRATGIPARFSGSGSGTDFTLTISRLEPEDFAVYYCSSYTSSTVVFGQGTKVEIK

SEQ ID NO: 5278 - protein, 250 aa, synthetic construct
QVQLVESGGGVVQPGRSLRLSCAASGFTFSSYAMHWVRQAPGKGLEWVAVISYDGSNKYYADSVKGRFTISRDNSKNTLYLQMNSLRAEDTAVYYCARGAYRRVPKMFDIWGQWGQGTLVTVSSGGSSRSSSSGGGGSGGGGEIVLTQSPATLSLSPGERATLSCRASQSVSSSYLAWYQQKPGQAPRLLIYGASSRATGIPARFSGSGSGTDFTLTISRLEPEDFAVYYCQQYGSSPITFGQGTKVEIK

SEQ ID NO: 5279 - protein, 254 aa, synthetic construct
QVQLVESGGGVVQPGRSLRLSCAASGFTFSSYAMHWVRQAPGKGLEWVAVISYDGSNKYYADSVKGRFTISRDNSKNTLYLQMNSLRAEDTAVYYCARGDYRVTGSTTYFDHWGQWGQGTLVTVSSGGSSRSSSSGGGGSGGGGEIVLTQSPATLSLSPGERATLSCRASQSVSSSYLAWYQQKPGQAPRLLIYGASSRATGIPARFSGSGSGTDFTLTISRLEPEDFAVYYCQQYYSSTPRLSFGQGTKVEIK

SEQ ID NO: 5280 - protein, 249 aa, synthetic construct
QVQLVESGGGVVQPGRSLRLSCAASGFTFSSYAMHWVRQAPGKGLEWVAVISYDGSNKYYADSVKGRFTISRDNSKNTLYLQMNSLRAEDTAVYYCARGGSWGYWMDYWGQWGQGTLVTVSSGGSSRSSSSGGGGSGGGGEIVLTQSPATLSLSPGERATLSCRASQSVSSSYLAWYQQKPGQAPRLLIYGASSRATGIPARFSGSGSGTDFTLTISRLEPEDFAVYYCQQRSNPPSFTFGQGTKVEIK

SEQ ID NO: 5281 - protein, 247 aa, synthetic construct
QVQLVESGGGVVQPGRSLRLSCAASGFTFSSYAMHWVRQAPGKGLEWVAVISYDGSNKYYADSVKGRFTISRDNSKNTLYLQMNSLRAEDTAVYYCARGKAWGWFDPWGQWGQGTLVTVSSGGSSRSSSSGGGGSGGGGEIVLTQSPATLSLSPGERATLSCRASQSVSSSYLAWYQQKPGQAPRLLIYGASSRATGIPARFSGSGSGTDFTLTISRLEPEDFAVYYCETWDSNSWVFGQGTKVEIK

SEQ ID NO: 5282 - protein, 256 aa, synthetic construct
QVQLVESGGGVVQPGRSLRLSCAASGFTFSSYAMHWVRQAPGKGLEWVAVISYDGSNKYYADSVKGRFTISRDNSKNTLYLQMNSLRAEDTAVYYCARGLRGYRGGGTYDAFDVWGQWGQGTLVTVSSGGSSRSSSSGGGGSGGGGEIVLTQSPATLSLSPGERATLSCRASQSVSSSYLAWYQQKPGQAPRLLIYGASSRATGIPARFSGSGSGTDFTLTISRLEPEDFAVYYCGTWDSSLSDWVFGQGTKVEIK

SEQ ID NO: 5283 - protein, 257 aa, synthetic construct
QVQLVESGGGVVQPGRSLRLSCAASGFTFSSYAMHWVRQAPGKGLEWVAVISYDGSNKYYADSVKGRFTISRDNSKNTLYLQMNSLRAEDTAVYYCARGLRGYRGGGTYDAFDVWGQWGQGTLVTVSSGGSSRSSSSGGGGSGGGGEIVLTQSPATLSLSPGERATLSCRASQSVSSSYLAWYQQKPGQAPRLLIYGASSRATGIPARFSGSGSGTDFTLTISRLEPEDFAVYYCQVWDSSSDHLYVFGQGTKVEIK

SEQ ID NO: 5284 - protein, 247 aa, synthetic construct
QVQLVESGGGVVQPGRSLRLSCAASGFTFSSYAMHWVRQAPGKGLEWVAVISYDGSNKYYADSVKGRFTISRDNSKNTLYLQMNSLRAEDTAVYYCARGLRWGAFDIWGQWGQGTLVTVSSGGSSRSSSSGGGGSGGGGEIVLTQSPATLSLSPGERATLSCRASQSVSSSYLAWYQQKPGQAPRLLIYGASSRATGIPARFSGSGSGTDFTLTISRLEPEDFAVYYCQQSYSPPISFGQGTKVEIK

SEQ ID NO: 5285 - protein, 250 aa, synthetic construct
QVQLVESGGGVVQPGRSLRLSCAASGFTFSSYAMHWVRQAPGKGLEWVAVISYDGSNKYYADSVKGRFTISRDNSKNTLYLQMNSLRAEDTAVYYCARGLYRGFGVGFDIWGQWGQGTLVTVSSGGSSRSSSSGGGGSGGGGEIVLTQSPATLSLSPGERATLSCRASQSVSSSYLAWYQQKPGQAPRLLIYGASSRATGIPARFSGSGSGTDFTLTISRLEPEDFAVYYCMQGANGPPVFGQGTKVEIK

SEQ ID NO: 5286 - protein, 251 aa, synthetic construct
QVQLVESGGGVVQPGRSLRLSCAASGFTFSSYAMHWVRQAPGKGLEWVAVISYDGSNKYYADSVKGRFTISRDNSKNTLYLQMNSLRAEDTAVYYCARGLYRGFGVGFDIWGQWGQGTLVTVSSGGSSRSSSSGGGGSGGGGEIVLTQSPATLSLSPGERATLSCRASQSVSSSYLAWYQQKPGQAPRLLIYGASSRATGIPARFSGSGSGTDFTLTISRLEPEDFAVYYCQQYYSTTALTFGQGTKVEIK

SEQ ID NO: 5287 - protein, 249 aa, synthetic construct
QVQLVESGGGVVQPGRSLRLSCAASGFTFSSYAMHWVRQAPGKGLEWVAVISYDGSNKYYADSVKGRFTISRDNSKNTLYLQMNSLRAEDTAVYYCARGPEDMLSFDVWGQWGQGTLVTVSSGGSSRSSSSGGGGSGGGGEIVLTQSPATLSLSPGERATLSCRASQSVSSSYLAWYQQKPGQAPRLLIYGASSRATGIPARFSGSGSGTDFTLTISRLEPEDFAVYYCQALDSSTGVVFGQGTKVEIK

SEQ ID NO: 5288 - protein, 250 aa, synthetic construct
QVQLVESGGGVVQPGRSLRLSCAASGFTFSSYAMHWVRQAPGKGLEWVAVISYDGSNKYYADSVKGRFTISRDNSKNTLYLQMNSLRAEDTAVYYCARGRDSGSFIIDYWGQWGQGTLVTVSSGGSSRSSSSGGGGSGGGGEIVLTQSPATLSLSPGERATLSCRASQSVSSSYLAWYQQKPGQAPRLLIYGASSRATGIPARFSGSGSGTDFTLTISRLEPEDFAVYYCQAWDSYSTHVFGQGTKVEIK

SEQ ID NO: 5289 - protein, 251 aa, synthetic construct
QVQLVESGGGVVQPGRSLRLSCAASGFTFSSYAMHWVRQAPGKGLEWVAVISYDGSNKYYADSVKGRFTISRDNSKNTLYLQMNSLRAEDTAVYYCARGRQGFASGGVDLWGQWGQGTLVTVSSGGSSRSSSSGGGGSGGGGEIVLTQSPATLSLSPGERATLSCRASQSVSSSYLAWYQQKPGQAPRLLIYGASSRATGIPARFSGSGSGTDFTLTISRLEPEDFAVYYCQVWDRNSDRVFGQGTKVEIK

SEQ ID NO: 5290 - protein, 251 aa, synthetic construct
QVQLVESGGGVVQPGRSLRLSCAASGFTFSSYAMHWVRQAPGKGLEWVAVISYDGSNKYYADSVKGRFTISRDNSKNTLYLQMNSLRAEDTAVYYCARGRYRGFGVGFDIWGQWGQGTLVTVSSGGSSRSSSSGGGGSGGGGEIVLTQSPATLSLSPGERATLSCRASQSVSSSYLAWYQQKPGQAPRLLIYGASSRATGIPARFSGSGSGTDFTLTISRLEPEDFAVYYCQAWDSNSAVVFGQGTKVEIK

SEQ ID NO: 5291 - protein, 254 aa, synthetic construct
QVQLVESGGGVVQPGRSLRLSCAASGFTFSSYAMHWVRQAPGKGLEWVAVISYDGSNKYYADSVKGRFTISRDNSKNTLYLQMNSLRAEDTAVYYCARGSYRTSSSKQYLDPWGQWGQGTLVTVSSGGSSRSSSSGGGGSGGGGEIVLTQSPATLSLSPGERATLSCRASQSVSSSYLAWYQQKPGQAPRLLIYGASSRATGIPARFSGSGSGTDFTLTISRLEPEDFAVYYCQSYDSNLSGPVFGQGTKVEIK

SEQ ID NO: 5292 - protein, 254 aa, synthetic construct
QVQLVESGGGVVQPGRSLRLSCAASGFTFSSYAMHWVRQAPGKGLEWVAVISYDGSNKYYADSVKGRFTISRDNSKNTLYLQMNSLRAEDTAVYYCARGSYRTSSSKQYLDPWGQWGQGTLVTVSSGGSSRSSSSGGGGSGGGGEIVLTQSPATLSLSPGERATLSCRASQSVSSSYLAWYQQKPGQAPRLLIYGASSRATGIPARFSGSGSGTDFTLTISRLEPEDFAVYYCQTYDNGLRGSIFGQGTKVEIK

SEQ ID NO: 5293 - protein, 253 aa, synthetic construct
QVQLVESGGGVVQPGRSLRLSCAASGFTFSSYAMHWVRQAPGKGLEWVAVISYDGSNKYYADSVKGRFTISRDNSKNTLYLQMNSLRAEDTAVYYCARGTNSYRRLVYDAFDIWGQWGQGTLVTVSSGGSSRSSSSGGGGSGGGGEIVLTQSPATLSLSPGERATLSCRASQSVSSSYLAWYQQKPGQAPRLLIYGASSRATGIPARFSGSGSGTDFTLTISRLEPEDFAVYYCNSYAGSGYVFGQGTKVEIK

SEQ ID NO: 5294 - protein, 254 aa, synthetic construct
QVQLVESGGGVVQPGRSLRLSCAASGFTFSSYAMHWVRQAPGKGLEWVAVISYDGSNKYYADSVKGRFTISRDNSKNTLYLQMNSLRAEDTAVYYCARGTNSYRRLVYDAFDIWGQWGQGTLVTVSSGGSSRSSSSGGGGSGGGGEIVLTQSPATLSLSPGERATLSCRASQSVSSSYLAWYQQKPGQAPRLLIYGASSRATGIPARFSGSGSGTDFTLTISRLEPEDFAVYYCQAWDSSTGYVFGQGTKVEIK

SEQ ID NO: 5295 - protein, 252 aa, synthetic construct
QVQLVESGGGVVQPGRSLRLSCAASGFTFSSYAMHWVRQAPGKGLEWVAVISYDGSNKYYADSVKGRFTISRDNSKNTLYLQMNSLRAEDTAVYYCARGTNSYRRLVYDAFDIWGQWGQGTLVTVSSGGSSRSSSSGGGGSGGGGEIVLTQSPATLSLSPGERATLSCRASQSVSSSYLAWYQQKPGQAPRLLIYGASSRATGIPARFSGSGSGTDFTLTISRLEPEDFAVYYCQQYHNTPTFGQGTKVEIK

SEQ ID NO: 5296 - protein, 253 aa, synthetic construct
QVQLVESGGGVVQPGRSLRLSCAASGFTFSSYAMHWVRQAPGKGLEWVAVISYDGSNKYYADSVKGRFTISRDNSKNTLYLQMNSLRAEDTAVYYCARGTNSYRRLVYDAFDIWGQWGQGTLVTVSSGGSSRSSSSGGGGSGGGGEIVLTQSPATLSLSPGERATLSCRASQSVSSSYLAWYQQKPGQAPRLLIYGASSRATGIPARFSGSGSGTDFTLTISRLEPEDFAVYYCQQYNSFPPTFGQGTKVEIK

SEQ ID NO: 5297 - protein, 256 aa, synthetic construct
QVQLVESGGGVVQPGRSLRLSCAASGFTFSSYAMHWVRQAPGKGLEWVAVISYDGSNKYYADSVKGRFTISRDNSKNTLYLQMNSLRAEDTAVYYCARGTNSYRRLVYDAFDIWGQWGQGTLVTVSSGGSSRSSSSGGGGSGGGGEIVLTQSPATLSLSPGERATLSCRASQSVSSSYLAWYQQKPGQAPRLLIYGASSRATGIPARFSGSGSGTDFTLTISRLEPEDFAVYYCQVWDSGSTRLGVFGQGTKVEIK

SEQ ID NO: 5298 - protein, 249 aa, synthetic construct
QVQLVESGGGVVQPGRSLRLSCAASGFTFSSYAMHWVRQAPGKGLEWVAVISYDGSNKYYADSVKGRFTISRDNSKNTLYLQMNSLRAEDTAVYYCARHHPSAAGAFDIWGQWGQGTLVTVSSGGSSRSSSSGGGGSGGGGEIVLTQSPATLSLSPGERATLSCRASQSVSSSYLAWYQQKPGQAPRLLIYGASSRATGIPARFSGSGSGTDFTLTISRLEPEDFAVYYCQQNYSTPWTFGQGTKVEIK

SEQ ID NO: 5299 - protein, 251 aa, synthetic construct
QVQLVESGGGVVQPGRSLRLSCAASGFTFSSYAMHWVRQAPGKGLEWVAVISYDGSNKYYADSVKGRFTISRDNSKNTLYLQMNSLRAEDTAVYYCARHPLYRNAADDYWGQWGQGTLVTVSSGGSSRSSSSGGGGSGGGGEIVLTQSPATLSLSPGERATLSCRASQSVSSSYLAWYQQKPGQAPRLLIYGASSRATGIPARFSGSGSGTDFTLTISRLEPEDFAVYYCQVWDYSRNNWVFGQGTKVEIK

SEQ ID NO: 5300 - protein, 251 aa, synthetic construct
QVQLVESGGGVVQPGRSLRLSCAASGFTFSSYAMHWVRQAPGKGLEWVAVISYDGSNKYYADSVKGRFTISRDNSKNTLYLQMNSLRAEDTAVYYCARHRGPAAGRFDPWGQWGQGTLVTVSSGGSSRSSSSGGGGSGGGGEIVLTQSPATLSLSPGERATLSCRASQSVSSSYLAWYQQKPGQAPRLLIYGASSRATGIPARFSGSGSGTDFTLTISRLEPEDFAVYYCETWDGSLSTVVFGQGTKVEIK

SEQ ID NO: 5301 - protein, 249 aa, synthetic construct
QVQLVESGGGVVQPGRSLRLSCAASGFTFSSYAMHWVRQAPGKGLEWVAVISYDGSNKYYADSVKGRFTISRDNSKNTLYLQMNSLRAEDTAVYYCARHRGPAAGRFDPWGQWGQGTLVTVSSGGSSRSSSSGGGGSGGGGEIVLTQSPATLSLSPGERATLSCRASQSVSSSYLAWYQQKPGQAPRLLIYGASSRATGIPARFSGSGSGTDFTLTISRLEPEDFAVYYCQAWDGSSVVFGQGTKVEIK

SEQ ID NO: 5302 - protein, 249 aa, synthetic construct
QVQLVESGGGVVQPGRSLRLSCAASGFTFSSYAMHWVRQAPGKGLEWVAVISYDGSNKYYADSVKGRFTISRDNSKNTLYLQMNSLRAEDTAVYYCARHRGPAAGRFDPWGQWGQGTLVTVSSGGSSRSSSSGGGGSGGGGEIVLTQSPATLSLSPGERATLSCRASQSVSSSYLAWYQQKPGQAPRLLIYGASSRATGIPARFSGSGSGTDFTLTISRLEPEDFAVYYCQQYGSSTYTFGQGTKVEIK

SEQ ID NO: 5303 - protein, 252 aa, synthetic construct
QVQLVESGGGVVQPGRSLRLSCAASGFTFSSYAMHWVRQAPGKGLEWVAVISYDGSNKYYADSVKGRFTISRDNSKNTLYLQMNSLRAEDTAVYYCARIPNRSHGGWFDPWGQWGQGTLVTVSSGGSSRSSSSGGGGSGGGGEIVLTQSPATLSLSPGERATLSCRASQSVSSSYLAWYQQKPGQAPRLLIYGASSRATGIPARFSGSGSGTDFTLTISRLEPEDFAVYYCGTWDSSLSANVFGQGTKVEIK

SEQ ID NO: 5304 - protein, 259 aa, synthetic construct
QVQLVESGGGVVQPGRSLRLSCAASGFTFSSYAMHWVRQAPGKGLEWVAVISYDGSNKYYADSVKGRFTISRDNSKNTLYLQMNSLRAEDTAVYYCARKEYRTFDSPYTLYRSSAYFDYWGQWGQGTLVTVSSGGSSRSSSSGGGGSGGGGEIVLTQSPATLSLSPGERATLSCRASQSVSSSYLAWYQQKPGQAPRLLIYGASSRATGIPARFSGSGSGTDFTLTISRLEPEDFAVYYCQSADSSGPVFGQGTKVEIK

SEQ ID NO: 5305 - protein, 247 aa, synthetic construct
QVQLVESGGGVVQPGRSLRLSCAASGFTFSSYAMHWVRQAPGKGLEWVAVISYDGSNKYYADSVKGRFTISRDNSKNTLYLQMNSLRAEDTAVYYCARKRPRPPYWGQWGQGTLVTVSSGGSSRSSSSGGGGSGGGGEIVLTQSPATLSLSPGERATLSCRASQSVSSSYLAWYQQKPGQAPRLLIYGASSRATGIPARFSGSGSGTDFTLTISRLEPEDFAVYYCQVWDSSSDHQVFGQGTKVEIK

SEQ ID NO: 5306 - protein, 247 aa, synthetic construct
QVQLVESGGGVVQPGRSLRLSCAASGFTFSSYAMHWVRQAPGKGLEWVAVISYDGSNKYYADSVKGRFTISRDNSKNTLYLQMNSLRAEDTAVYYCARLGPHYGMDVWGQWGQGTLVTVSSGGSSRSSSSGGGGSGGGGEIVLTQSPATLSLSPGERATLSCRASQSVSSSYLAWYQQKPGQAPRLLIYGASSRATGIPARFSGSGSGTDFTLTISRLEPEDFAVYYCQTWGTGDVVFGQGTKVEIK

SEQ ID NO: 5307 - protein, 251 aa, synthetic construct
QVQLVESGGGVVQPGRSLRLSCAASGFTFSSYAMHWVRQAPGKGLEWVAVISYDGSNKYYADSVKGRFTISRDNSKNTLYLQMNSLRAEDTAVYYCARLHLRGSIGLPPDYWGQWGQGTLVTVSSGGSSRSSSSGGGGSGGGGEIVLTQSPATLSLSPGERATLSCRASQSVSSSYLAWYQQKPGQAPRLLIYGASSRATGIPARFSGSGSGTDFTLTISRLEPEDFAVYYCQQYKRNPRTFGQGTKVEIK

SEQ ID NO: 5308 - protein, 253 aa, synthetic construct
QVQLVESGGGVVQPGRSLRLSCAASGFTFSSYAMHWVRQAPGKGLEWVAVISYDGSNKYYADSVKGRFTISRDNSKNTLYLQMNSLRAEDTAVYYCARNAVAGTWLSSFDYWGQWGQGTLVTVSSGGSSRSSSSGGGGSGGGGEIVLTQSPATLSLSPGERATLSCRASQSVSSSYLAWYQQKPGQAPRLLIYGASSRATGIPARFSGSGSGTDFTLTISRLEPEDFAVYYCQVLDSSSDDVVFGQGTKVEIK

SEQ ID NO: 5309 - protein, 249 aa, synthetic construct
QVQLVESGGGVVQPGRSLRLSCAASGFTFSSYAMHWVRQAPGKGLEWVAVISYDGSNKYYADSVKGRFTISRDNSKNTLYLQMNSLRAEDTAVYYCARQYSSGWPWFDPWGQWGQGTLVTVSSGGSSRSSSSGGGGSGGGGEIVLTQSPATLSLSPGERATLSCRASQSVSSSYLAWYQQKPGQAPRLLIYGASSRATGIPARFSGSGSGTDFTLTISRLEPEDFAVYYCQQYGSSPFTFGQGTKVEIK

SEQ ID NO: 5310 - protein, 248 aa, synthetic construct
QVQLVESGGGVVQPGRSLRLSCAASGFTFSSYAMHWVRQAPGKGLEWVAVISYDGSNKYYADSVKGRFTISRDNSKNTLYLQMNSLRAEDTAVYYCARRDPGTWQFDPWGQWGQGTLVTVSSGGSSRSSSSGGGGSGGGGEIVLTQSPATLSLSPGERATLSCRASQSVSSSYLAWYQQKPGQAPRLLIYGASSRATGIPARFSGSGSGTDFTLTISRLEPEDFAVYYCMQARQTPVTFGQGTKVEIK

SEQ ID NO: 5311 - protein, 249 aa, synthetic construct
QVQLVESGGGVVQPGRSLRLSCAASGFTFSSYAMHWVRQAPGKGLEWVAVISYDGSNKYYADSVKGRFTISRDNSKNTLYLQMNSLRAEDTAVYYCARRDSGNMYGYWGQWGQGTLVTVSSGGSSRSSSSGGGGSGGGGEIVLTQSPATLSLSPGERATLSCRASQSVSSSYLAWYQQKPGQAPRLLIYGASSRATGIPARFSGSGSGTDFTLTISRLEPEDFAVYYCAAWDSRSRLYMFGQGTKVEIK

SEQ ID NO: 5312 - protein, 252 aa, synthetic construct
QVQLVESGGGVVQPGRSLRLSCAASGFTFSSYAMHWVRQAPGKGLEWVAVISYDGSNKYYADSVKGRFTISRDNSKNTLYLQMNSLRAEDTAVYYCARRIRANSRYSPDPWGQWGQGTLVTVSSGGSSRSSSSGGGGSGGGGEIVLTQSPATLSLSPGERATLSCRASQSVSSSYLAWYQQKPGQAPRLLIYGASSRATGIPARFSGSGSGTDFTLTISRLEPEDFAVYYCGTWDSRLSTGMFGQGTKVEIK

SEQ ID NO: 5313 - protein, 250 aa, synthetic construct
QVQLVESGGGVVQPGRSLRLSCAASGFTFSSYAMHWVRQAPGKGLEWVAVISYDGSNKYYADSVKGRFTISRDNSKNTLYLQMNSLRAEDTAVYYCARRIRANSRYSPDPWGQWGQGTLVTVSSGGSSRSSSSGGGGSGGGGEIVLTQSPATLSLSPGERATLSCRASQSVSSSYLAWYQQKPGQAPRLLIYGASSRATGIPARFSGSGSGTDFTLTISRLEPEDFAVYYCQQYYDPPWTFGQGTKVEIK

SEQ ID NO: 5314 - protein, 251 aa, synthetic construct
QVQLVESGGGVVQPGRSLRLSCAASGFTFSSYAMHWVRQAPGKGLEWVAVISYDGSNKYYADSVKGRFTISRDNSKNTLYLQMNSLRAEDTAVYYCARRLRGRAMETDYWGQWGQGTLVTVSSGGSSRSSSSGGGGSGGGGEIVLTQSPATLSLSPGERATLSCRASQSVSSSYLAWYQQKPGQAPRLLIYGASSRATGIPARFSGSGSGTDFTLTISRLEPEDFAVYYCQVWDSRHDHWVFGQGTKVEIK

SEQ ID NO: 5315 - protein, 257 aa, synthetic construct
QVQLVESGGGVVQPGRSLRLSCAASGFTFSSYAMHWVRQAPGKGLEWVAVISYDGSNKYYADSVKGRFTISRDNSKNTLYLQMNSLRAEDTAVYYCARRSGSGWLHYYKDYYMDVWGQWGQGTLVTVSSGGSSRSSSSGGGGSGGGGEIVLTQSPATLSLSPGERATLSCRASQSVSSSYLAWYQQKPGQAPRLLIYGASSRATGIPARFSGSGSGTDFTLTISRLEPEDFAVYYCQQRSNWPRMITFGQGTKVEIK

SEQ ID NO: 5316 - protein, 260 aa, synthetic construct
QVQLVESGGGVVQPGRSLRLSCAASGFTFSSYAMHWVRQAPGKGLEWVAVISYDGSNKYYADSVKGRFTISRDNSKNTLYLQMNSLRAEDTAVYYCARSRAGYRVDYLAWSGLFDYWGQWGQGTLVTVSSGGSSRSSSSGGGGSGGGGEIVLTQSPATLSLSPGERATLSCRASQSVSSSYLAWYQQKPGQAPRLLIYGASSRATGIPARFSGSGSGTDFTLTISRLEPEDFAVYYCSTYDNSQRNGGSVFGQGTKVEIK

SEQ ID NO: 5317 - protein, 258 aa, synthetic construct
QVQLVESGGGVVQPGRSLRLSCAASGFTFSSYAMHWVRQAPGKGLEWVAVISYDGSNKYYADSVKGRFTISRDNSKNTLYLQMNSLRAEDTAVYYCARSYVYRIGTWSYDVYLGDVWGQWGQGTLVTVSSGGSSRSSSSGGGGSGGGGEIVLTQSPATLSLSPGERATLSCRASQSVSSSYLAWYQQKPGQAPRLLIYGASSRATGIPARFSGSGSGTDFTLTISRLEPEDFAVYYCQVWDSSSDHYVFGQGTKVEIK

SEQ ID NO: 5318 - protein, 248 aa, synthetic construct
QVQLVESGGGVVQPGRSLRLSCAASGFTFSSYAMHWVRQAPGKGLEWVAVISYDGSNKYYADSVKGRFTISRDNSKNTLYLQMNSLRAEDTAVYYCARTMRGQLGYWGQWGQGTLVTVSSGGSSRSSSSGGGGSGGGGEIVLTQSPATLSLSPGERATLSCRASQSVSSSYLAWYQQKPGQAPRLLIYGASSRATGIPARFSGSGSGTDFTLTISRLEPEDFAVYYCQQRSNWPGPFTFGQGTKVEIK

SEQ ID NO: 5319 - protein, 249 aa, synthetic construct
QVQLVESGGGVVQPGRSLRLSCAASGFTFSSYAMHWVRQAPGKGLEWVAVISYDGSNKYYADSVKGRFTISRDNSKNTLYLQMNSLRAEDTAVYYCARTRYPYSMDVWGQWGQGTLVTVSSGGSSRSSSSGGGGSGGGGEIVLTQSPATLSLSPGERATLSCRASQSVSSSYLAWYQQKPGQAPRLLIYGASSRATGIPARFSGSGSGTDFTLTISRLEPEDFAVYYCSSYDSSSGFVVFGQGTKVEIK

SEQ ID NO: 5320 - protein, 252 aa, synthetic construct
QVQLVESGGGVVQPGRSLRLSCAASGFTFSSYAMHWVRQAPGKGLEWVAVISYDGSNKYYADSVKGRFTISRDNSKNTLYLQMNSLRAEDTAVYYCARVLSSRSWGSGYFDYWGQWGQGTLVTVSSGGSSRSSSSGGGGSGGGGEIVLTQSPATLSLSPGERATLSCRASQSVSSSYLAWYQQKPGQAPRLLIYGASSRATGIPARFSGSGSGTDFTLTISRLEPEDFAVYYCQHKNSYPLIFGQGTKVEIK

SEQ ID NO: 5321 - protein, 253 aa, synthetic construct
QVQLVESGGGVVQPGRSLRLSCAASGFTFSSYAMHWVRQAPGKGLEWVAVISYDGSNKYYADSVKGRFTISRDNSKNTLYLQMNSLRAEDTAVYYCARVSYGGLGSLDFYFQHWGQWGQGTLVTVSSGGSSRSSSSGGGGSGGGGEIVLTQSPATLSLSPGERATLSCRASQSVSSSYLAWYQQKPGQAPRLLIYGASSRATGIPARFSGSGSGTDFTLTISRLEPEDFAVYYCQAWDSSGVVFGQGTKVEIK

SEQ ID NO: 5322 - protein, 246 aa, synthetic construct
QVQLVESGGGVVQPGRSLRLSCAASGFTFSSYAMHWVRQAPGKGLEWVAVISYDGSNKYYADSVKGRFTISRDNSKNTLYLQMNSLRAEDTAVYYCARYTWIGFDIWGQWGQGTLVTVSSGGSSRSSSSGGGGSGGGGEIVLTQSPATLSLSPGERATLSCRASQSVSSSYLAWYQQKPGQAPRLLIYGASSRATGIPARFSGSGSGTDFTLTISRLEPEDFAVYYCQHYYTVPFTFGQGTKVEIK

SEQ ID NO: 5323 - protein, 251 aa, synthetic construct
QVQLVESGGGVVQPGRSLRLSCAASGFTFSSYAMHWVRQAPGKGLEWVAVISYDGSNKYYADSVKGRFTISRDNSKNTLYLQMNSLRAEDTAVYYCARYYDPTGYLTDYWGQWGQGTLVTVSSGGSSRSSSSGGGGSGGGGEIVLTQSPATLSLSPGERATLSCRASQSVSSSYLAWYQQKPGQAPRLLIYGASSRATGIPARFSGSGSGTDFTLTISRLEPEDFAVYYCAARDDNLDGWVFGQGTKVEIK

SEQ ID NO: 5324 - protein, 249 aa, synthetic construct
QVQLVESGGGVVQPGRSLRLSCAASGFTFSSYAMHWVRQAPGKGLEWVAVISYDGSNKYYADSVKGRFTISRDNSKNTLYLQMNSLRAEDTAVYYCARYYDPTGYLTDYWGQWGQGTLVTVSSGGSSRSSSSGGGGSGGGGEIVLTQSPATLSLSPGERATLSCRASQSVSSSYLAWYQQKPGQAPRLLIYGASSRATGIPARFSGSGSGTDFTLTISRLEPEDFAVYYCQQHYSTPRTFGQGTKVEIK

SEQ ID NO: 5325 - protein, 253 aa, synthetic construct
QVQLVESGGGVVQPGRSLRLSCAASGFTFSSYAMHWVRQAPGKGLEWVAVISYDGSNKYYADSVKGRFTISRDNSKNTLYLQMNSLRAEDTAVYYCASEGYRTDRKYWLDYWGQWGQGTLVTVSSGGSSRSSSSGGGGSGGGGEIVLTQSPATLSLSPGERATLSCRASQSVSSSYLAWYQQKPGQAPRLLIYGASSRATGIPARFSGSGSGTDFTLTISRLEPEDFAVYYCGTWDSGSSAGIFGQGTKVEIK

SEQ ID NO: 5326 - protein, 251 aa, synthetic construct
QVQLVESGGGVVQPGRSLRLSCAASGFTFSSYAMHWVRQAPGKGLEWVAVISYDGSNKYYADSVKGRFTISRDNSKNTLYLQMNSLRAEDTAVYYCASEGYRTDRKYWLDYWGQWGQGTLVTVSSGGSSRSSSSGGGGSGGGGEIVLTQSPATLSLSPGERATLSCRASQSVSSSYLAWYQQKPGQAPRLLIYGASSRATGIPARFSGSGSGTDFTLTISRLEPEDFAVYYCMQGAPRPFTFGQGTKVEIK

SEQ ID NO: 5327 - protein, 252 aa, synthetic construct
QVQLVESGGGVVQPGRSLRLSCAASGFTFSSYAMHWVRQAPGKGLEWVAVISYDGSNKYYADSVKGRFTISRDNSKNTLYLQMNSLRAEDTAVYYCATGGYRDSSGYMDYWGQWGQGTLVTVSSGGSSRSSSSGGGGSGGGGEIVLTQSPATLSLSPGERATLSCRASQSVSSSYLAWYQQKPGQAPRLLIYGASSRATGIPARFSGSGSGTDFTLTISRLEPEDFAVYYCQVWDSSSDHVVFGQGTKVEIK

SEQ ID NO: 5328 - protein, 255 aa, synthetic construct
QVQLVESGGGVVQPGRSLRLSCAASGFTFSSYAMHWVRQAPGKGLEWVAVISYDGSNKYYADSVKGRFTISRDNSKNTLYLQMNSLRAEDTAVYYCATGGYRGVLAGVAFDIWGQWGQGTLVTVSSGGSSRSSSSGGGGSGGGGEIVLTQSPATLSLSPGERATLSCRASQSVSSSYLAWYQQKPGQAPRLLIYGASSRATGIPARFSGSGSGTDFTLTISRLEPEDFAVYYCAAWDDSLSGFYVFGQGTKVEIK

SEQ ID NO: 5329 - protein, 253 aa, synthetic construct
QVQLVESGGGVVQPGRSLRLSCAASGFTFSSYAMHWVRQAPGKGLEWVAVISYDGSNKYYADSVKGRFTISRDNSKNTLYLQMNSLRAEDTAVYYCATGGYRGVLAGVAFDIWGQWGQGTLVTVSSGGSSRSSSSGGGGSGGGGEIVLTQSPATLSLSPGERATLSCRASQSVSSSYLAWYQQKPGQAPRLLIYGASSRATGIPARFSGSGSGTDFTLTISRLEPEDFAVYYCLLSYSGARHVFGQGTKVEIK

SEQ ID NO: 5330 - protein, 252 aa, synthetic construct
QVQLVESGGGVVQPGRSLRLSCAASGFTFSSYAMHWVRQAPGKGLEWVAVISYDGSNKYYADSVKGRFTISRDNSKNTLYLQMNSLRAEDTAVYYCATGGYRGVLAGVAFDIWGQWGQGTLVTVSSGGSSRSSSSGGGGSGGGGEIVLTQSPATLSLSPGERATLSCRASQSVSSSYLAWYQQKPGQAPRLLIYGASSRATGIPARFSGSGSGTDFTLTISRLEPEDFAVYYCQQYENYPLTFGQGTKVEIK

SEQ ID NO: 5331 - protein, 255 aa, synthetic construct
QVQLVESGGGVVQPGRSLRLSCAASGFTFSSYAMHWVRQAPGKGLEWVAVISYDGSNKYYADSVKGRFTISRDNSKNTLYLQMNSLRAEDTAVYYCATGGYRGVLAGVAFDIWGQWGQGTLVTVSSGGSSRSSSSGGGGSGGGGEIVLTQSPATLSLSPGERATLSCRASQSVSSSYLAWYQQKPGQAPRLLIYGASSRATGIPARFSGSGSGTDFTLTISRLEPEDFAVYYCQVWDSSSSHLVVFGQGTKVEIK

SEQ ID NO: 5332 - protein, 252 aa, synthetic construct
QVQLVESGGGVVQPGRSLRLSCAASGFTFSSYAMHWVRQAPGKGLEWVAVISYDGSNKYYADSVKGRFTISRDNSKNTLYLQMNSLRAEDTAVYYCATGGYRGVLAGVAFDIWGQWGQGTLVTVSSGGSSRSSSSGGGGSGGGGEIVLTQSPATLSLSPGERATLSCRASQSVSSSYLAWYQQKPGQAPRLLIYGASSRATGIPARFSGSGSGTDFTLTISRLEPEDFAVYYCQVWDSSTAVFGQGTKVEIK

SEQ ID NO: 5333 - protein, 252 aa, synthetic construct
QVQLVESGGGVVQPGRSLRLSCAASGFTFSSYAMHWVRQAPGKGLEWVAVISYDGSNKYYADSVKGRFTISRDNSKNTLYLQMNSLRAEDTAVYYCATGSYRKYAGGFDYWGQWGQGTLVTVSSGGSSRSSSSGGGGSGGGGEIVLTQSPATLSLSPGERATLSCRASQSVSSSYLAWYQQKPGQAPRLLIYGASSRATGIPARFSGSGSGTDFTLTISRLEPEDFAVYYCNSRDSRGEHVIFGQGTKVEIK

SEQ ID NO: 5334 - protein, 250 aa, synthetic construct
QVQLVESGGGVVQPGRSLRLSCAASGFTFSSYAMHWVRQAPGKGLEWVAVISYDGSNKYYADSVKGRFTISRDNSKNTLYLQMNSLRAEDTAVYYCATGSYRKYAGGFDYWGQWGQGTLVTVSSGGSSRSSSSGGGGSGGGGEIVLTQSPATLSLSPGERATLSCRASQSVSSSYLAWYQQKPGQAPRLLIYGASSRATGIPARFSGSGSGTDFTLTISRLEPEDFAVYYCQQYDDLPITFGQGTKVEIK

SEQ ID NO: 5335 - protein, 250 aa, synthetic construct
QVQLVESGGGVVQPGRSLRLSCAASGFTFSSYAMHWVRQAPGKGLEWVAVISYDGSNKYYADSVKGRFTISRDNSKNTLYLQMNSLRAEDTAVYYCATGSYRKYAGGFDYWGQWGQGTLVTVSSGGSSRSSSSGGGGSGGGGEIVLTQSPATLSLSPGERATLSCRASQSVSSSYLAWYQQKPGQAPRLLIYGASSRATGIPARFSGSGSGTDFTLTISRLEPEDFAVYYCQQYGSSPKTFGQGTKVEIK

SEQ ID NO: 5336 - protein, 244 aa, synthetic construct
QVQLVESGGGVVQPGRSLRLSCAASGFTFSSYAMHWVRQAPGKGLEWVAVISYDGSNKYYADSVKGRFTISRDNSKNTLYLQMNSLRAEDTAVYYCATLGPNDHWGQWGQGTLVTVSSGGSSRSSSSGGGGSGGGGEIVLTQSPATLSLSPGERATLSCRASQSVSSSYLAWYQQKPGQAPRLLIYGASSRATGIPARFSGSGSGTDFTLTISRLEPEDFAVYYCLQYNSTPWTFGQGTKVEIK

SEQ ID NO: 5337 - protein, 247 aa, synthetic construct
QVQLVESGGGVVQPGRSLRLSCAASGFTFSSYAMHWVRQAPGKGLEWVAVISYDGSNKYYADSVKGRFTISRDNSKNTLYLQMNSLRAEDTAVYYCSRKVGAFGNWGQWGQGTLVTVSSGGSSRSSSSGGGGSGGGGEIVLTQSPATLSLSPGERATLSCRASQSVSSSYLAWYQQKPGQAPRLLIYGASSRATGIPARFSGSGSGTDFTLTISRLEPEDFAVYYCTSYTSSSELYAFGQGTKVEIK

SEQ ID NO: 5338 - protein, 247 aa, synthetic construct
QVQLVESGGGVVQPGRSLRLSCAASGFTFSSYAMHWVRQAPGKGLEWVAVISYDGSNKYYADSVKGRFTISRDNSKNTLYLQMNSLRAEDTAVYYCTRDFIGRGFDYWGQWGQGTLVTVSSGGSSRSSSSGGGGSGGGGEIVLTQSPATLSLSPGERATLSCRASQSVSSSYLAWYQQKPGQAPRLLIYGASSRATGIPARFSGSGSGTDFTLTISRLEPEDFAVYYCQQRYSAPYTFGQGTKVEIK

SEQ ID NO: 5339 - protein, 250 aa, synthetic construct
QVQLVESGGGVVQPGRSLRLSCAASGFTFSSYAMHWVRQAPGKGLEWVAVISYDGSNKYYADSVKGRFTISRDNSKNTLYLQMNSLRAEDTAVYYCVRAFSYSWPFDHWGQWGQGTLVTVSSGGSSRSSSSGGGGSGGGGEIVLTQSPATLSLSPGERATLSCRASQSVSSSYLAWYQQKPGQAPRLLIYGASSRATGIPARFSGSGSGTDFTLTISRLEPEDFAVYYCQQYKNWHPTWSFGQGTKVEIK

SEQ ID NO: 5340 - protein, 253 aa, synthetic construct
QVQLVESGGGVVQPGRSLRLSCAASGFTFSSYAMHWVRQAPGKGLEWVAVISYDGSNKYYADSVKGRFTISRDNSKNTLYLQMNSLRAEDTAVYYCVRDSVGYRDQPGYYLDYWGQWGQGTLVTVSSGGSSRSSSSGGGGSGGGGEIVLTQSPATLSLSPGERATLSCRASQSVSSSYLAWYQQKPGQAPRLLIYGASSRATGIPARFSGSGSGTDFTLTISRLEPEDFAVYYCQQYNSYPSTFGQGTKVEIK

SEQ ID NO: 5341 - protein, 248 aa, synthetic construct
QVQLVESGGGVVQPGRSLRLSCAASGFTFSSYAMHWVRQAPGKGLEWVAVISYDGSNKYYADSVKGRFTISRDNSKNTLYLQMNSLRAEDTAVYYCVRKNQTAGGHWGQWGQGTLVTVSSGGSSRSSSSGGGGSGGGGEIVLTQSPATLSLSPGERATLSCRASQSVSSSYLAWYQQKPGQAPRLLIYGASSRATGIPARFSGSGSGTDFTLTISRLEPEDFAVYYCQVWDSRADHWVFGQGTKVEIK

SEQ ID NO: 5342 - protein, 246 aa, synthetic construct
QVQLVESGGGVVQPGRSLRLSCAASGFTFSSYAMHWVRQAPGKGLEWVAVISYDGSNKYYADSVKGRFTISRDNSKNTLYLQMNSLRAEDTAVYYCVRRGAKGLGYWGQWGQGTLVTVSSGGSSRSSSSGGGGSGGGGEIVLTQSPATLSLSPGERATLSCRASQSVSSSYLAWYQQKPGQAPRLLIYGASSRATGIPARFSGSGSGTDFTLTISRLEPEDFAVYYCRQGSRWPWAFGQGTKVEIK

SEQ ID NO: 5343 - protein, 254 aa, synthetic construct
QVQLVESGGGVVQPGRSLRLSCAASGFTFSSYAMHWVRQAPGKGLEWVAVISYDGSNKYYADSVKGRFTISRDNSKNTLYLQMNSLRAEDTAVYYCVRRPRWFDSAYYAPFENWGQWGQGTLVTVSSGGSSRSSSSGGGGSGGGGEIVLTQSPATLSLSPGERATLSCRASQSVSSSYLAWYQQKPGQAPRLLIYGASSRATGIPARFSGSGSGTDFTLTISRLEPEDFAVYYCSSYTSSSTLVFGQGTKVEIK

SEQ ID NO: 5344 - protein, 250 aa, synthetic construct
QVQLVESGGGVVQPGRSLRLSCAASGFTFSSYAMHWVRQAPGKGLEWVAVISYDGSNKYYADSVKGRFTISRDNSKNTLYLQMNSLRAEDTAVYYCVSDKSGSGFLYWGQWGQGTLVTVSSGGSSRSSSSGGGGSGGGGEIVLTQSPATLSLSPGERATLSCRASQSVSSSYLAWYQQKPGQAPRLLIYGASSRATGIPARFSGSGSGTDFTLTISRLEPEDFAVYYCASFDSSSLSAWVFGQGTKVEIK

SEQ ID NO: 5345 - protein, 245 aa, synthetic construct
QVQLVESGGGVVQPGRSLRLSCAASGFTFSSYAMHWVRQAPGKGLEWVAVISYDGSNKYYADSVKGRFTISRDNSKNTLYLQMNSLRAEDTAVYYCVTYFGRKDYWGQWGQGTLVTVSSGGSSRSSSSGGGGSGGGGEIVLTQSPATLSLSPGERATLSCRASQSVSSSYLAWYQQKPGQAPRLLIYGASSRATGIPARFSGSGSGTDFTLTISRLEPEDFAVYYCQQYYTSPNTFGQGTKVEIK

SEQ ID NO: 5346 - protein, 247 aa, synthetic construct
QVQLVESGGGVVQPGRSLRLSCAASGFTFSSYAMHWVRQAPGKGLEWVAVISYDGSNKYYADSVKGRFTISRDNSKNTLYLQMNSLRAEDTAVYYCVTYFGRKDYWGQWGQGTLVTVSSGGSSRSSSSGGGGSGGGGEIVLTQSPATLSLSPGERATLSCRASQSVSSSYLAWYQQKPGQAPRLLIYGASSRATGIPARFSGSGSGTDFTLTISRLEPEDFAVYYCQVWDSSLDLWVFGQGTKVEIK

SEQ ID NO: 5347 - protein, 12 aa, synthetic construct
WTQPGNIVTNGA

SEQ ID NO: 5348 - protein, 11 aa, synthetic construct
GDLLKIQFGGA

SEQ ID NO: 5349 - protein, 9 aa, synthetic construct
SMSQSLSLA

SEQ ID NO: 5350 - protein, 13 aa, synthetic construct
SSTENFITLVDLV

SEQ ID NO: 5351 - protein, 9 aa, synthetic construct
GTHVIAAAR

SEQ ID NO: 5352 - protein, 14 aa, synthetic construct
RDEFLALLVEHLRE

SEQ ID NO: 5353 - protein, 9 aa, synthetic construct
SAEDYVRQS

SEQ ID NO: 5354 - protein, 11 aa, synthetic construct
GDLLKIQFGGA

SEQ ID NO: 5355 - protein, 9 aa, synthetic construct
SMSQSLSLA

SEQ ID NO: 5356 - protein, 13 aa, synthetic construct
SSTENFITLVDLV

SEQ ID NO: 5357 - protein, 9 aa, synthetic construct
GTHVIAAAR

SEQ ID NO: 5358 - protein, 14 aa, synthetic construct
RDEFLALLVEHLRE

SEQ ID NO: 5359 - protein, 9 aa, synthetic construct
SAEDYVRQS

SEQ ID NO: 5360 - protein, 17 aa, synthetic construct
SIYQDQEQRILKFLEEL

SEQ ID NO: 5361 - protein, 16 aa, synthetic construct
DILKVLFKEFIEISLW

SEQ ID NO: 5362 - protein, 17 aa, synthetic construct
KTMVDELFAEIVRQMNY

SEQ ID NO: 5363 - protein, 16 aa, synthetic construct
FADYNLLDLLLIHQVL

SEQ ID NO: 5364 - protein, 15 aa, synthetic construct
EDGVMARQLVYTIAD

SEQ ID NO: 5365 - protein, 16 aa, synthetic construct
TSMATPHVSGVATLVW

SEQ ID NO: 5366 - protein, 12 aa, synthetic construct
RLDRYADLIQKL

SEQ ID NO: 5367 - protein, 20 aa, synthetic construct
YENGAMLEPLSVALAGLQRA

SEQ ID NO: 5368 - protein, 12 aa, synthetic construct
EKETKEMVAFLN

SEQ ID NO: 5369 - protein, 16 aa, synthetic construct
RSEAIRDLIRDFIIRH

SEQ ID NO: 5370 - protein, 12 aa, synthetic construct
TIDILTAIRNAT

SEQ ID NO: 5371 - protein, 9 aa, synthetic construct
VDGAIHRAA

SEQ ID NO: 5372 - protein, 12 aa, synthetic construct
TIDILTAIRNAT

SEQ ID NO: 5373 - protein, 18 aa, synthetic construct
YQYLAARLAIFHLRKKAY

SEQ ID NO: 5374 - protein, 16 aa, synthetic construct
VGPAIARDIINLYNQH

SEQ ID NO: 5375 - protein, 20 aa, synthetic construct
DMIFEIFKNYLTKVAYYARQ

SEQ ID NO: 5376 - protein, 20 aa, synthetic construct
LGEWIALNVFEFFTNLNQFY

SEQ ID NO: 5377 - protein, 11 aa, synthetic construct
FAFALRKAQDT

SEQ ID NO: 5378 - protein, 18 aa, synthetic construct
GEELILKGIEAFKNWLKK

SEQ ID NO: 5379 - protein, 11 aa, synthetic construct
FAFALRKAQDT

SEQ ID NO: 5380 - protein, 16 aa, synthetic construct
HRELVHPDALNRFGKT

SEQ ID NO: 5381 - protein, 19 aa, synthetic construct
TRKALNYVPKLFEELRKTY

SEQ ID NO: 5382 - protein, 17 aa, synthetic construct
RENVDRVTEALRAALQH

SEQ ID NO: 5383 - protein, 17 aa, synthetic construct
SIYQDQEQRILKFLEEL

SEQ ID NO: 5384 - protein, 18 aa, synthetic construct
TEKYLDFMPKLFDAVRNK

SEQ ID NO: 5385 - protein, 16 aa, synthetic construct
DILKVLFKEFIEISLW

SEQ ID NO: 5386 - protein, 17 aa, synthetic construct
KTMVDELFAEIVRQMNY

SEQ ID NO: 5387 - protein, 19 aa, synthetic construct
GAVSLASMLTEIFLLQQAQ

SEQ ID NO: 5388 - protein, 19 aa, synthetic construct
PAFYLTASQQRWEEYLKKG

SEQ ID NO: 5389 - protein, 15 aa, synthetic construct
EDGVMARQLVYTIAD

SEQ ID NO: 5390 - protein, 16 aa, synthetic construct
TSMATPHVSGVATLVW

SEQ ID NO: 5391 - protein, 12 aa, synthetic construct
RLDRYADLIQKL

SEQ ID NO: 5392 - protein, 20 aa, synthetic construct
YENGAMLEPLSVALAGLQRA

SEQ ID NO: 5393 - protein, 12 aa, synthetic construct
EKETKEMVAFLN

SEQ ID NO: 5394 - protein, 16 aa, synthetic construct
RSEAIRDLIRDFIIRH

SEQ ID NO: 5395 - protein, 12 aa, synthetic construct
TIDILTAIRNAT

SEQ ID NO: 5396 - protein, 9 aa, synthetic construct
VDGAIHRAA

SEQ ID NO: 5397 - protein, 12 aa, synthetic construct
TIDILTAIRNAT

SEQ ID NO: 5398 - protein, 20 aa, synthetic construct
SLYSGSKGAVDSFVRIFSKD

SEQ ID NO: 5399 - protein, 16 aa, synthetic construct
VGPAIARDIINLYNQH

SEQ ID NO: 5400 - protein, 20 aa, synthetic construct
DMIFEIFKNYLTKVAYYARQ

SEQ ID NO: 5401 - protein, 20 aa, synthetic construct
LGEWIALNVFEFFTNLNQFY

SEQ ID NO: 5402 - protein, 11 aa, synthetic construct
FAFALRKAQDT

SEQ ID NO: 5403 - protein, 19 aa, synthetic construct
AQRRKMAQENPKMHNSEIL

SEQ ID NO: 5404 - protein, 11 aa, synthetic construct
FAFALRKAQDT

SEQ ID NO: 5405 - protein, 16 aa, synthetic construct
KLKDLSRFDASFFGVH

SEQ ID NO: 5406 - protein, 16 aa, synthetic construct
HRELVHPDALNRFGKT

SEQ ID NO: 5407 - protein, 19 aa, synthetic construct
TRKALNYVPKLFEELRKTY

SEQ ID NO: 5408 - protein, 18 aa, synthetic construct
AKGREEEARKLLRWGQQN

SEQ ID NO: 5409 - protein, 14 aa, synthetic construct
QTSLDAAQTLIRGA

SEQ ID NO: 5410 - protein, 10 aa, synthetic construct
LPLVDFIIQN

SEQ ID NO: 5411 - protein, 12 aa, synthetic construct
SSVVRGKMDGGW

SEQ ID NO: 5412 - protein, 14 aa, synthetic construct
RDTIINTLKKASKL

SEQ ID NO: 5413 - protein, 13 aa, synthetic construct
HGDLQRWQSALDA

SEQ ID NO: 5414 - protein, 10 aa, synthetic construct
DGEIKELLEK

SEQ ID NO: 5415 - protein, 14 aa, synthetic construct
AMVLESVMFAILAE

SEQ ID NO: 5416 - protein, 10 aa, synthetic construct
LRLFVRIGAM

SEQ ID NO: 5417 - protein, 11 aa, synthetic construct
PIKALMRYSEN

SEQ ID NO: 5418 - protein, 13 aa, synthetic construct
GPQVGYLSEAFEA

SEQ ID NO: 5419 - protein, 12 aa, synthetic construct
KSVIEALKHGGL

SEQ ID NO: 5420 - protein, 14 aa, synthetic construct
PDAQNALLSSLSEQ

SEQ ID NO: 5421 - protein, 11 aa, synthetic construct
TNADLLARAAS

SEQ ID NO: 5422 - protein, 10 aa, synthetic construct
NAGALAVHQL

SEQ ID NO: 5423 - protein, 12 aa, synthetic construct
IPEALRLLLQAL

SEQ ID NO: 5424 - protein, 12 aa, synthetic construct
PVGLAAAASARL

SEQ ID NO: 5425 - protein, 12 aa, synthetic construct
FAAIESVAKNIQ

SEQ ID NO: 5426 - protein, 11 aa, synthetic construct
VEEDVQLLKDL

SEQ ID NO: 5427 - protein, 13 aa, synthetic construct
HLELLLRDLEDSR

SEQ ID NO: 5428 - protein, 13 aa, synthetic construct
KIAQHTADYEERF

SEQ ID NO: 5429 - protein, 13 aa, synthetic construct
SGVAALIKVLLSL

SEQ ID NO: 5430 - protein, 15 aa, synthetic construct
TARARKFANRIHGRF

SEQ ID NO: 5431 - protein, 12 aa, synthetic construct
SFLARNRLVIAL

SEQ ID NO: 5432 - protein, 10 aa, synthetic construct
AAEAAKVALE

SEQ ID NO: 5433 - protein, 13 aa, synthetic construct
NIGASLAKRLEQT

SEQ ID NO: 5434 - protein, 14 aa, synthetic construct
EADIKERKELLRKF

SEQ ID NO: 5435 - protein, 10 aa, synthetic construct
DGEIKELLEK

SEQ ID NO: 5436 - protein, 14 aa, synthetic construct
AARMATYMDTIDYF

SEQ ID NO: 5437 - protein, 9 aa, synthetic construct
EFLLTGVLK

SEQ ID NO: 5438 - protein, 9 aa, synthetic construct
ALGTIRDII

SEQ ID NO: 5439 - protein, 10 aa, synthetic construct
PVDVITAIKA

SEQ ID NO: 5440 - protein, 12 aa, synthetic construct
WNMLRGNATQAA

SEQ ID NO: 5441 - protein, 14 aa, synthetic construct
SEPAWATALSVFAA

SEQ ID NO: 5442 - protein, 11 aa, synthetic construct
SAAAKKLINDY

SEQ ID NO: 5443 - protein, 8 aa, synthetic construct
SAEILSAS

SEQ ID NO: 5444 - protein, 13 aa, synthetic construct
DGTFLRAAELARN

SEQ ID NO: 5445 - protein, 8 aa, synthetic construct
RTELMQAS

SEQ ID NO: 5446 - protein, 11 aa, synthetic construct
QQNLILHYQAV

SEQ ID NO: 5447 - protein, 13 aa, synthetic construct
ARAYYLLGLAYDG

SEQ ID NO: 5448 - protein, 12 aa, synthetic construct
TEIAVDIARSVE

SEQ ID NO: 5449 - protein, 11 aa, synthetic construct
QQGQALAATAN

SEQ ID NO: 5450 - protein, 10 aa, synthetic construct
SQDIRALADA

SEQ ID NO: 5451 - protein, 8 aa, synthetic construct
GYSLVARK

SEQ ID NO: 5452 - protein, 10 aa, synthetic construct
WPKERDAATL

SEQ ID NO: 5453 - protein, 9 aa, synthetic construct
IPHVQRLIG

SEQ ID NO: 5454 - protein, 8 aa, synthetic construct
DLAVVKAA

SEQ ID NO: 5455 - protein, 14 aa, synthetic construct
TPGMIMASEALLRK

SEQ ID NO: 5456 - protein, 13 aa, synthetic construct
AEQFIGMSGSGYS

SEQ ID NO: 5457 - protein, 12 aa, synthetic construct
KEEIEEVVSETV

SEQ ID NO: 5458 - protein, 13 aa, synthetic construct
QEGMYQHFKAIAE

SEQ ID NO: 5459 - protein, 8 aa, synthetic construct
ASLAALAL

SEQ ID NO: 5460 - protein, 14 aa, synthetic construct
SRATLANIDRAREQ

SEQ ID NO: 5461 - protein, 10 aa, synthetic construct
NVADIIRRVW

SEQ ID NO: 5462 - protein, 9 aa, synthetic construct
ILDASLELF

SEQ ID NO: 5463 - protein, 11 aa, synthetic construct
KTQLIDVIAEK

SEQ ID NO: 5464 - protein, 10 aa, synthetic construct
IEAFFRLVKR

SEQ ID NO: 5465 - protein, 13 aa, synthetic construct
AEEKSRARRHLRT

SEQ ID NO: 5466 - protein, 10 aa, synthetic construct
RDEIFATINE

SEQ ID NO: 5467 - protein, 11 aa, synthetic construct
LASRFFAMKRS

SEQ ID NO: 5468 - protein, 13 aa, synthetic construct
QVTIDSALATQKY

SEQ ID NO: 5469 - protein, 11 aa, synthetic construct
SFVLQKIVSAI

SEQ ID NO: 5470 - protein, 11 aa, synthetic construct
DVMKKASELQK

SEQ ID NO: 5471 - protein, 13 aa, synthetic construct
WGALRYIRDLAAD

SEQ ID NO: 5472 - protein, 10 aa, synthetic construct
RKIMSLSNKL

SEQ ID NO: 5473 - protein, 9 aa, synthetic construct
QEDLAREKA

SEQ ID NO: 5474 - protein, 11 aa, synthetic construct
PLAGILFIIEE

SEQ ID NO: 5475 - protein, 14 aa, synthetic construct
AEEKFKEIAEAYDV

SEQ ID NO: 5476 - protein, 12 aa, synthetic construct
KVKQADALSSKT

SEQ ID NO: 5477 - protein, 13 aa, synthetic construct
SQGQSYGMFSALA

SEQ ID NO: 5478 - protein, 10 aa, synthetic construct
QEAAQKVVEQ

SEQ ID NO: 5479 - protein, 9 aa, synthetic construct
GQAAAATLL

SEQ ID NO: 5480 - protein, 10 aa, synthetic construct
EAILAAKAAG

SEQ ID NO: 5481 - protein, 12 aa, synthetic construct
EYARILEERATS

SEQ ID NO: 5482 - protein, 10 aa, synthetic construct
QGIIDHFQKA

SEQ ID NO: 5483 - protein, 10 aa, synthetic construct
DIALWSGLAG

SEQ ID NO: 5484 - protein, 12 aa, synthetic construct
AKAHYDGIVAFS

SEQ ID NO: 5485 - protein, 14 aa, synthetic construct
AARMATYMDTIDYF

SEQ ID NO: 5486 - protein, 14 aa, synthetic construct
VPQAMTAFAEFLNR

SEQ ID NO: 5487 - protein, 13 aa, synthetic construct
TWYRTIQDRTITD

SEQ ID NO: 5488 - protein, 10 aa, synthetic construct
QRDLLMYAVG

SEQ ID NO: 5489 - protein, 13 aa, synthetic construct
TGALGLISDWLLT

SEQ ID NO: 5490 - protein, 10 aa, synthetic construct
PVTTGFYEAI

SEQ ID NO: 5491 - protein, 12 aa, synthetic construct
LIRMFKRLEELV

SEQ ID NO: 5492 - protein, 12 aa, synthetic construct
GFFTAQTLHVAV

SEQ ID NO: 5493 - protein, 13 aa, synthetic construct
FYPAAAFIDRALS

SEQ ID NO: 5494 - protein, 18 aa, synthetic construct
SEEEARLKKSADTLWGIQ

SEQ ID NO: 5495 - protein, 12 aa, synthetic construct
TIPVLLDIAERT

SEQ ID NO: 5496 - protein, 13 aa, synthetic construct
PLLKASIKETLRL

SEQ ID NO: 5497 - protein, 14 aa, synthetic construct
RGDAEVVISEWDQV

SEQ ID NO: 5498 - protein, 11 aa, synthetic construct
IEDVIQANVKA

SEQ ID NO: 5499 - protein, 10 aa, synthetic construct
NTLEEIIFKL

SEQ ID NO: 5500 - protein, 9 aa, synthetic construct
RAATVGSLA

SEQ ID NO: 5501 - protein, 20 aa, synthetic construct
WREILERDVRNIITYFSRTY

SEQ ID NO: 5502 - protein, 8 aa, synthetic construct
PTIAFAHD

SEQ ID NO: 5503 - protein, 8 aa, synthetic construct
ANVSAAIS

SEQ ID NO: 5504 - protein, 9 aa, synthetic construct
GLEEVLYEL

SEQ ID NO: 5505 - protein, 12 aa, synthetic construct
DTLRARAVAAAR

SEQ ID NO: 5506 - protein, 11 aa, synthetic construct
PSKTLMDNYEV

SEQ ID NO: 5507 - protein, 14 aa, synthetic construct
DQEAVTAIEKFVDD

SEQ ID NO: 5508 - protein, 9 aa, synthetic construct
PEAADMVFT

SEQ ID NO: 5509 - protein, 11 aa, synthetic construct
SASQAEQFLKL

SEQ ID NO: 5510 - protein, 12 aa, synthetic construct
AFREMSDMILQA

SEQ ID NO: 5511 - protein, 9 aa, synthetic construct
TNSMRMMQQ

SEQ ID NO: 5512 - protein, 11 aa, synthetic construct
GPEGMTSFMRS

SEQ ID NO: 5513 - protein, 10 aa, synthetic construct
IERINELVAY

SEQ ID NO: 5514 - protein, 14 aa, synthetic construct
HLLDQFATAMIERT

SEQ ID NO: 5515 - protein, 8 aa, synthetic construct
VTEIAKKL

SEQ ID NO: 5516 - protein, 15 aa, synthetic construct
GAQVQALADAALEAF

SEQ ID NO: 5517 - protein, 16 aa, synthetic construct
TASLLSNVTDELRRMT

SEQ ID NO: 5518 - protein, 18 aa, synthetic construct
PLLQQIHNITSFIRQAKA

SEQ ID NO: 5519 - protein, 16 aa, synthetic construct
RHTIVNFVEQSLIVDM

SEQ ID NO: 5520 - protein, 16 aa, synthetic construct
QAHAEAWAALRHLAER

SEQ ID NO: 5521 - protein, 18 aa, synthetic construct
IVDLLQIVNQITQKLRQI

SEQ ID NO: 5522 - protein, 16 aa, synthetic construct
AADLKAVQDKLKTFVE

SEQ ID NO: 5523 - protein, 16 aa, synthetic construct
QTASHALDAALELAAD

SEQ ID NO: 5524 - protein, 18 aa, synthetic construct
QAFVDATWPQAAKAAQSL

SEQ ID NO: 5525 - protein, 17 aa, synthetic construct
RGHQKLINATVEKAREV

SEQ ID NO: 5526 - protein, 18 aa, synthetic construct
ASIFFAIKDAIRAARAQH

SEQ ID NO: 5527 - protein, 16 aa, synthetic construct
EQEHRKRVIRELNSLI

SEQ ID NO: 5528 - protein, 15 aa, synthetic construct
APARLHWLATLLMDA

SEQ ID NO: 5529 - protein, 16 aa, synthetic construct
KGFHAIQTHRLAHWLY

SEQ ID NO: 5530 - protein, 16 aa, synthetic construct
LKDLVRKAEEIGRELS

SEQ ID NO: 5531 - protein, 18 aa, synthetic construct
YQYLAARLAIFHLRKKAY

SEQ ID NO: 5532 - protein, 15 aa, synthetic construct
PVGDVKELGAIQEVF

SEQ ID NO: 5533 - protein, 18 aa, synthetic construct
TQALLRFLADHSRSKDTV

SEQ ID NO: 5534 - protein, 18 aa, synthetic construct
GRDLALLGRFYAEALVDS

SEQ ID NO: 5535 - protein, 16 aa, synthetic construct
AELRSTFFRALSDAQN

SEQ ID NO: 5536 - protein, 20 aa, synthetic construct
PREEERLKASAKARSRTLQE

SEQ ID NO: 5537 - protein, 17 aa, synthetic construct
QEQAQAGEDNLGAQAAA

SEQ ID NO: 5538 - protein, 18 aa, synthetic construct
VDELMMRLMAAMEIFTAQ

SEQ ID NO: 5539 - protein, 13 aa, synthetic construct
EMETVIPVDVMRR

SEQ ID NO: 5540 - protein, 18 aa, synthetic construct
IAEKVQYMIEWWTKSGEL

SEQ ID NO: 5541 - protein, 19 aa, synthetic construct
KEVRASAKALVQKWTNEVF

SEQ ID NO: 5542 - protein, 16 aa, synthetic construct
PAMKQIKRKIQEFHRT

SEQ ID NO: 5543 - protein, 19 aa, synthetic construct
ETTQERLRSGYEDAVDYNR

SEQ ID NO: 5544 - protein, 18 aa, synthetic construct
VQVAEEAIVNAMRVLYYR

SEQ ID NO: 5545 - protein, 16 aa, synthetic construct
YALGVRSGLQELAPHL

SEQ ID NO: 5546 - protein, 12 aa, synthetic construct
DTLRARAVAAAR

SEQ ID NO: 5547 - protein, 20 aa, synthetic construct
VEEVRELLEWYNNMNRLLKM

SEQ ID NO: 5548 - protein, 16 aa, synthetic construct
TELKHTLESEGRELVK

SEQ ID NO: 5549 - protein, 18 aa, synthetic construct
TDTYVTRIRAAVQARQRI

SEQ ID NO: 5550 - protein, 15 aa, synthetic construct
SEERAHRRMLQLQVK

SEQ ID NO: 5551 - protein, 19 aa, synthetic construct
TTTAVVVAGELLRKAEELL

SEQ ID NO: 5552 - protein, 18 aa, synthetic construct
GGPLGLMQAVLDHTIPYL

SEQ ID NO: 5553 - protein, 16 aa, synthetic construct
IFYAELARGIEDIATM

SEQ ID NO: 5554 - protein, 17 aa, synthetic construct
SEEIKKKALEFVKYINS

SEQ ID NO: 5555 - protein, 18 aa, synthetic construct
AEQLLSQARDFINQYYSS

SEQ ID NO: 5556 - protein, 15 aa, synthetic construct
ILHLVGDVVALLEAI

SEQ ID NO: 5557 - protein, 20 aa, synthetic construct
AVARAALINMVFQMGETGVA

SEQ ID NO: 5558 - protein, 14 aa, synthetic construct
AAGIAALAFSLNEL

SEQ ID NO: 5559 - protein, 17 aa, synthetic construct
FARVVETVSEAMSGLLA

SEQ ID NO: 5560 - protein, 16 aa, synthetic construct
SVNLLKSHLEELAKKQ

SEQ ID NO: 5561 - protein, 17 aa, synthetic construct
PFALKPLIAWTERERAA

SEQ ID NO: 5562 - protein, 17 aa, synthetic construct
AQAFLSEEQAFVNSILN

SEQ ID NO: 5563 - protein, 19 aa, synthetic construct
QQLRDAIEEYGNAIRQLAA

SEQ ID NO: 5564 - protein, 18 aa, synthetic construct
VPFNIASYALLTMMIAQV

SEQ ID NO: 5565 - protein, 15 aa, synthetic construct
RDQILLRLLASALQI

SEQ ID NO: 5566 - protein, 15 aa, synthetic construct
AGATILRLAKDLAEN

SEQ ID NO: 5567 - protein, 19 aa, synthetic construct
EEGLRMNISVGIQYIASWL

SEQ ID NO: 5568 - protein, 19 aa, synthetic construct
KSLIQDYDAEMAEYMKKRT

SEQ ID NO: 5569 - protein, 16 aa, synthetic construct
VGAVKAATDAGAAAAR

SEQ ID NO: 5570 - protein, 18 aa, synthetic construct
HAAELAKAEAGVAEMAAK

SEQ ID NO: 5571 - protein, 20 aa, synthetic construct
EEEKEKYAEMAREWRAAQGK

SEQ ID NO: 5572 - protein, 16 aa, synthetic construct
QAHAEAWAALRHLAER

SEQ ID NO: 5573 - protein, 19 aa, synthetic construct
QNRIDYLKAHIGQAWKAIQ

SEQ ID NO: 5574 - protein, 18 aa, synthetic construct
DEQIVDNIEAVLNVVAKK

SEQ ID NO: 5575 - protein, 19 aa, synthetic construct
ERHLDRKAELIVQVRILLK

SEQ ID NO: 5576 - protein, 16 aa, synthetic construct
HQSDVWSFGVLLWEIF

SEQ ID NO: 5577 - protein, 18 aa, synthetic construct
LPDLAARILPQAARALKE

SEQ ID NO: 5578 - protein, 16 aa, synthetic construct
PYLGAQIAKAMVKGYQ

SEQ ID NO: 5579 - protein, 18 aa, synthetic construct
EEQARKAFDRATKLEQEF

SEQ ID NO: 5580 - protein, 16 aa, synthetic construct
FVDFLVYDVLDLHRIF

SEQ ID NO: 5581 - protein, 15 aa, synthetic construct
YDKVIERILEFIREK

SEQ ID NO: 5582 - protein, 19 aa, synthetic construct
GKWWRRQLNVYWSRWLVTA

SEQ ID NO: 5583 - protein, 18 aa, synthetic construct
HLPRIERYVRLLAEHLAA

SEQ ID NO: 5584 - protein, 15 aa, synthetic construct
PEEYEKTLDELVART

SEQ ID NO: 5585 - protein, 15 aa, synthetic construct
ASSIMQTLFSQLKQF

SEQ ID NO: 5586 - protein, 18 aa, synthetic construct
LPFGFVSMFLAPWIERRL

SEQ ID NO: 5587 - protein, 18 aa, synthetic construct
LSEALKEATKEVHIRAEN

SEQ ID NO: 5588 - protein, 18 aa, synthetic construct
SEEEARLKKSADTLWGIQ

SEQ ID NO: 5589 - protein, 15 aa, synthetic construct
DSYNESIVNWLYRRH

SEQ ID NO: 5590 - protein, 18 aa, synthetic construct
IMYKGHLNLMYGLYQLVT

SEQ ID NO: 5591 - protein, 19 aa, synthetic construct
GAYSISVAEHAFALLLAHA

SEQ ID NO: 5592 - protein, 16 aa, synthetic construct
VQVTNYVEDRIIALRN

SEQ ID NO: 5593 - protein, 17 aa, synthetic construct
FLPFGYLVDQWRWGVFS

SEQ ID NO: 5594 - protein, 18 aa, synthetic construct
PASRFIRVAFLRDAMIKN

SEQ ID NO: 5595 - protein, 8 aa, synthetic construct
FQELFGPG

SEQ ID NO: 5596 - protein, 17 aa, synthetic construct
WLLEDAKGLFNATVRDA

SEQ ID NO: 5597 - protein, 16 aa, synthetic construct
GERAKQLRRFSIATLR

SEQ ID NO: 5598 - protein, 15 aa, synthetic construct
GNAIYERSFAIIRAE

SEQ ID NO: 5599 - protein, 9 aa, synthetic construct
REKLENLTE

SEQ ID NO: 5600 - protein, 9 aa, synthetic construct
DETKKARMQ

SEQ ID NO: 5601 - protein, 9 aa, synthetic construct
ENREIAQRE

SEQ ID NO: 5602 - protein, 9 aa, synthetic construct
ERIKSTLKE

SEQ ID NO: 5603 - protein, 9 aa, synthetic construct
DEQIREMKS

SEQ ID NO: 5604 - protein, 9 aa, synthetic construct
EKERLEAQT

SEQ ID NO: 5605 - protein, 9 aa, synthetic construct
RIHETNLKK

SEQ ID NO: 5606 - protein, 9 aa, synthetic construct
NEEIKKLHT

SEQ ID NO: 5607 - protein, 9 aa, synthetic construct
DQRKHHTET

SEQ ID NO: 5608 - protein, 9 aa, synthetic construct
RDTRERLHT

SEQ ID NO: 5609 - protein, 9 aa, synthetic construct
DEKRMLKTT

SEQ ID NO: 5610 - protein, 9 aa, synthetic construct
NQELKEVRD

SEQ ID NO: 5611 - protein, 9 aa, synthetic construct
ENLKNLEKH

SEQ ID NO: 5612 - protein, 9 aa, synthetic construct
TEHEKQVKE

SEQ ID NO: 5613 - protein, 10 aa, synthetic construct
SSKAKELKDR

SEQ ID NO: 5614 - protein, 10 aa, synthetic construct
NDKIEAIKSH

SEQ ID NO: 5615 - protein, 10 aa, synthetic construct
RERIREHLSS

SEQ ID NO: 5616 - protein, 10 aa, synthetic construct
RDVQDQLKEK

SEQ ID NO: 5617 - protein, 10 aa, synthetic construct
TSELREAMRK

SEQ ID NO: 5618 - protein, 10 aa, synthetic construct
QQAEDKIKEL

SEQ ID NO: 5619 - protein, 10 aa, synthetic construct
KETQKQLIDD

SEQ ID NO: 5620 - protein, 10 aa, synthetic construct
REGKDRTRQL

SEQ ID NO: 5621 - protein, 10 aa, synthetic construct
EKIRQTLEDA

SEQ ID NO: 5622 - protein, 10 aa, synthetic construct
DKIIKRANEN

SEQ ID NO: 5623 - protein, 10 aa, synthetic construct
REGAEKINQK

SEQ ID NO: 5624 - protein, 10 aa, synthetic construct
DDVVKKLDSS

SEQ ID NO: 5625 - protein, 10 aa, synthetic construct
DRTRKLMEVT

SEQ ID NO: 5626 - protein, 10 aa, synthetic construct
AEHVQQIKEH

SEQ ID NO: 5627 - protein, 10 aa, synthetic construct
RDELTQAAKK

SEQ ID NO: 5628 - protein, 10 aa, synthetic construct
AQRIKEIQDR

SEQ ID NO: 5629 - protein, 10 aa, synthetic construct
ENEIQAKAKE

SEQ ID NO: 5630 - protein, 10 aa, synthetic construct
SDDIRKLLES

SEQ ID NO: 5631 - protein, 10 aa, synthetic construct
KDSLKKIHSI

SEQ ID NO: 5632 - protein, 10 aa, synthetic construct
KKDIDDTIKS

SEQ ID NO: 5633 - protein, 10 aa, synthetic construct
KKELKELLQT

SEQ ID NO: 5634 - protein, 10 aa, synthetic construct
RDLTERAMRQ

SEQ ID NO: 5635 - protein, 10 aa, synthetic construct
IDTRLEKLKN

SEQ ID NO: 5636 - protein, 10 aa, synthetic construct
QIDEHHAVRT

SEQ ID NO: 5637 - protein, 10 aa, synthetic construct
AEETIKELKN

SEQ ID NO: 5638 - protein, 10 aa, synthetic construct
EKDTVDQVRI

SEQ ID NO: 5639 - protein, 10 aa, synthetic construct
DDETLRNVKS

SEQ ID NO: 5640 - protein, 10 aa, synthetic construct
RDELHRLLTQ

SEQ ID NO: 5641 - protein, 10 aa, synthetic construct
KEKLEATINE

SEQ ID NO: 5642 - protein, 10 aa, synthetic construct
DERVQQIKKS

SEQ ID NO: 5643 - protein, 10 aa, synthetic construct
RDQGKEMATK

SEQ ID NO: 5644 - protein, 10 aa, synthetic construct
LSTDRKMDEV

SEQ ID NO: 5645 - protein, 10 aa, synthetic construct
VEDLTSKAEK

SEQ ID NO: 5646 - protein, 10 aa, synthetic construct
EDKLRTIANE

SEQ ID NO: 5647 - protein, 10 aa, synthetic construct
REKLLDTMNR

SEQ ID NO: 5648 - protein, 10 aa, synthetic construct
NHNLERIREL

SEQ ID NO: 5649 - protein, 10 aa, synthetic construct
DKSRKLLESI

SEQ ID NO: 5650 - protein, 10 aa, synthetic construct
KNDIVELKNK

SEQ ID NO: 5651 - protein, 10 aa, synthetic construct
HTDSHLHTRQ

SEQ ID NO: 5652 - protein, 10 aa, synthetic construct
QRLRTKLETE

SEQ ID NO: 5653 - protein, 10 aa, synthetic construct
ERTRADIKSV

SEQ ID NO: 5654 - protein, 10 aa, synthetic construct
PHVTERVQKE

SEQ ID NO: 5655 - protein, 10 aa, synthetic construct
DNKLNEIGEK

SEQ ID NO: 5656 - protein, 10 aa, synthetic construct
KPKADQKLEQ

SEQ ID NO: 5657 - protein, 10 aa, synthetic construct
SAKKKDVISE

SEQ ID NO: 5658 - protein, 10 aa, synthetic construct
INEVKQHLER

SEQ ID NO: 5659 - protein, 10 aa, synthetic construct
KKEVDQAIKS

SEQ ID NO: 5660 - protein, 10 aa, synthetic construct
ATDTHRLHKE

SEQ ID NO: 5661 - protein, 10 aa, synthetic construct
HAERLKVQKN

SEQ ID NO: 5662 - protein, 10 aa, synthetic construct
TKIREKVRSD

SEQ ID NO: 5663 - protein, 10 aa, synthetic construct
ADDVKQLKSK

SEQ ID NO: 5664 - protein, 10 aa, synthetic construct
LHQVRKKLDS

SEQ ID NO: 5665 - protein, 10 aa, synthetic construct
EVEVRQARDN

SEQ ID NO: 5666 - protein, 10 aa, synthetic construct
HEKHTTALEK

SEQ ID NO: 5667 - protein, 10 aa, synthetic construct
KEDVQASLER

SEQ ID NO: 5668 - protein, 10 aa, synthetic construct
EHIKDVLKSN

SEQ ID NO: 5669 - protein, 10 aa, synthetic construct
KDELIRNNQE

SEQ ID NO: 5670 - protein, 10 aa, synthetic construct
LNTRLRKLDE

SEQ ID NO: 5671 - protein, 10 aa, synthetic construct
KDTINKIRDL

SEQ ID NO: 5672 - protein, 10 aa, synthetic construct
EMRDLVQRET

SEQ ID NO: 5673 - protein, 10 aa, synthetic construct
NREVLEQVER

SEQ ID NO: 5674 - protein, 10 aa, synthetic construct
NREVLDQVER

SEQ ID NO: 5675 - protein, 10 aa, synthetic construct
SDKAHKVLKQ

SEQ ID NO: 5676 - protein, 10 aa, synthetic construct
EAQTRELRLK

SEQ ID NO: 5677 - protein, 10 aa, synthetic construct
PETLKENLDK

SEQ ID NO: 5678 - protein, 10 aa, synthetic construct
ETTAERIKKE

SEQ ID NO: 5679 - protein, 10 aa, synthetic construct
LDDLKTRVES

SEQ ID NO: 5680 - protein, 10 aa, synthetic construct
KEHLNEIRKN

SEQ ID NO: 5681 - protein, 10 aa, synthetic construct
GQELERQLKE

SEQ ID NO: 5682 - protein, 10 aa, synthetic construct
DKVIQQIKKD

SEQ ID NO: 5683 - protein, 10 aa, synthetic construct
RDERKKSLLS

SEQ ID NO: 5684 - protein, 10 aa, synthetic construct
HETRELTRMN

SEQ ID NO: 5685 - protein, 10 aa, synthetic construct
QPTIREKVRE

SEQ ID NO: 5686 - protein, 10 aa, synthetic construct
ENTVKKLREA

SEQ ID NO: 5687 - protein, 11 aa, synthetic construct
SLMREKIRNES

SEQ ID NO: 5688 - protein, 11 aa, synthetic construct
EPMLKNFEKDT

SEQ ID NO: 5689 - protein, 11 aa, synthetic construct
EWEQLTVELRK

SEQ ID NO: 5690 - protein, 11 aa, synthetic construct
GQKDLMDRLNE

SEQ ID NO: 5691 - protein, 11 aa, synthetic construct
TKTFHEAIRDK

SEQ ID NO: 5692 - protein, 11 aa, synthetic construct
KGKITDFLSEH

SEQ ID NO: 5693 - protein, 11 aa, synthetic construct
QKRVDKIFDQM

SEQ ID NO: 5694 - protein, 11 aa, synthetic construct
INHTKDILKKF

SEQ ID NO: 5695 - protein, 11 aa, synthetic construct
DEQRKLLKEAQ

SEQ ID NO: 5696 - protein, 11 aa, synthetic construct
KSIAEDIIKKN

SEQ ID NO: 5697 - protein, 11 aa, synthetic construct
AEKIKQEVDAS

SEQ ID NO: 5698 - protein, 11 aa, synthetic construct
YKEDIKIMKQT

SEQ ID NO: 5699 - protein, 11 aa, synthetic construct
SDDVRHAVQRV

SEQ ID NO: 5700 - protein, 11 aa, synthetic construct
HSKYREEAMQN

SEQ ID NO: 5701 - protein, 11 aa, synthetic construct
SYDTGKEIIKE

SEQ ID NO: 5702 - protein, 11 aa, synthetic construct
LNNKVDELKKS

SEQ ID NO: 5703 - protein, 11 aa, synthetic construct
WEALRESIKTH

SEQ ID NO: 5704 - protein, 11 aa, synthetic construct
HSLVKAKLRET

SEQ ID NO: 5705 - protein, 11 aa, synthetic construct
ENDKEQLKAIS

SEQ ID NO: 5706 - protein, 11 aa, synthetic construct
SIGDRMKRYEN

SEQ ID NO: 5707 - protein, 11 aa, synthetic construct
RDKVNDIVDQV

SEQ ID NO: 5708 - protein, 11 aa, synthetic construct
DTVYKKLVQRE

SEQ ID NO: 5709 - protein, 11 aa, synthetic construct
SEKVVQEALDK

SEQ ID NO: 5710 - protein, 11 aa, synthetic construct
EKTLSAVKEKI

SEQ ID NO: 5711 - protein, 11 aa, synthetic construct
RDQLVGKIQER

SEQ ID NO: 5712 - protein, 11 aa, synthetic construct
HDEQTAIKNKL

SEQ ID NO: 5713 - protein, 11 aa, synthetic construct
PNDLKHVKKLS

SEQ ID NO: 5714 - protein, 11 aa, synthetic construct
DDRLNKVISEL

SEQ ID NO: 5715 - protein, 11 aa, synthetic construct
KKLLTWREETG

SEQ ID NO: 5716 - protein, 11 aa, synthetic construct
VSEKEHATRLL

SEQ ID NO: 5717 - protein, 11 aa, synthetic construct
TNRDYLAERLR

SEQ ID NO: 5718 - protein, 11 aa, synthetic construct
IHRYVNEMNKE

SEQ ID NO: 5719 - protein, 11 aa, synthetic construct
NDRKSFLLRDS

SEQ ID NO: 5720 - protein, 11 aa, synthetic construct
LDAARENARKN

SEQ ID NO: 5721 - protein, 11 aa, synthetic construct
EKIQKEAQEAL

SEQ ID NO: 5722 - protein, 11 aa, synthetic construct
DIARKEQLKSL

SEQ ID NO: 5723 - protein, 11 aa, synthetic construct
WSHTERLLKEH

SEQ ID NO: 5724 - protein, 11 aa, synthetic construct
KDSAARAKSDL

SEQ ID NO: 5725 - protein, 11 aa, synthetic construct
KETENKIIKDY

SEQ ID NO: 5726 - protein, 11 aa, synthetic construct
KDTLRETIKFM

SEQ ID NO: 5727 - protein, 11 aa, synthetic construct
FNTILKEIKER

SEQ ID NO: 5728 - protein, 11 aa, synthetic construct
SAQVDRLREEF

SEQ ID NO: 5729 - protein, 11 aa, synthetic construct
KAETKKLIDLT

SEQ ID NO: 5730 - protein, 11 aa, synthetic construct
SKERIPETVKK

SEQ ID NO: 5731 - protein, 11 aa, synthetic construct
KQERTLFKELI

SEQ ID NO: 5732 - protein, 11 aa, synthetic construct
EKSKTAFKEAQ

SEQ ID NO: 5733 - protein, 11 aa, synthetic construct
LSEALKEATKE

SEQ ID NO: 5734 - protein, 11 aa, synthetic construct
ETKIFEAVKQE

SEQ ID NO: 5735 - protein, 11 aa, synthetic construct
EEQVTKLLHRK

SEQ ID NO: 5736 - protein, 11 aa, synthetic construct
RTDLKDYITKN

SEQ ID NO: 5737 - protein, 11 aa, synthetic construct
TLLEKTLKERL

SEQ ID NO: 5738 - protein, 11 aa, synthetic construct
KEALASRFKET

SEQ ID NO: 5739 - protein, 11 aa, synthetic construct
ENQSKKLKELM

SEQ ID NO: 5740 - protein, 11 aa, synthetic construct
LEKVKNWQKDA

SEQ ID NO: 5741 - protein, 11 aa, synthetic construct
AKKQINDYVEK

SEQ ID NO: 5742 - protein, 11 aa, synthetic construct
SSLKDIDIARE

SEQ ID NO: 5743 - protein, 11 aa, synthetic construct
EEARTRKFQAM

SEQ ID NO: 5744 - protein, 11 aa, synthetic construct
GEDTWEAIKQK

SEQ ID NO: 5745 - protein, 11 aa, synthetic construct
HHTRVRVYQEI

SEQ ID NO: 5746 - protein, 11 aa, synthetic construct
DARKKDLKSIQ

SEQ ID NO: 5747 - protein, 11 aa, synthetic construct
DEKAEHLQKTY

SEQ ID NO: 5748 - protein, 11 aa, synthetic construct
KEFQKESLSMD

SEQ ID NO: 5749 - protein, 11 aa, synthetic construct
PKEAEQFVKES

SEQ ID NO: 5750 - protein, 11 aa, synthetic construct
REEFTKKVRTN

SEQ ID NO: 5751 - protein, 11 aa, synthetic construct
ERANELVESYR

SEQ ID NO: 5752 - protein, 11 aa, synthetic construct
ASDVEERVQKS

SEQ ID NO: 5753 - protein, 11 aa, synthetic construct
RENALLELSKK

SEQ ID NO: 5754 - protein, 11 aa, synthetic construct
VEEAKNRADQW

SEQ ID NO: 5755 - protein, 11 aa, synthetic construct
LEEWVEKAKSS

SEQ ID NO: 5756 - protein, 11 aa, synthetic construct
MTQKVEELKET

SEQ ID NO: 5757 - protein, 11 aa, synthetic construct
ENSKKTQELVE

SEQ ID NO: 5758 - protein, 11 aa, synthetic construct
ETTAERIKKEI

SEQ ID NO: 5759 - protein, 11 aa, synthetic construct
TDQMREAVKRV

SEQ ID NO: 5760 - protein, 11 aa, synthetic construct
NHDVKLLRKLN

SEQ ID NO: 5761 - protein, 11 aa, synthetic construct
FATKLREKLES

SEQ ID NO: 5762 - protein, 11 aa, synthetic construct
EKGKRIRENYS

SEQ ID NO: 5763 - protein, 11 aa, synthetic construct
HDQAVRTYQEH

SEQ ID NO: 5764 - protein, 11 aa, synthetic construct
KENLLDFIKHN

SEQ ID NO: 5765 - protein, 11 aa, synthetic construct
MESTFERIKEL

SEQ ID NO: 5766 - protein, 11 aa, synthetic construct
KDQARQALDKL

SEQ ID NO: 5767 - protein, 11 aa, synthetic construct
SKDMESHVFLK

SEQ ID NO: 5768 - protein, 11 aa, synthetic construct
VKDAMQHLDRQ

SEQ ID NO: 5769 - protein, 11 aa, synthetic construct
VDRLKDKVNNT

SEQ ID NO: 5770 - protein, 11 aa, synthetic construct
NRDVERIAELS

SEQ ID NO: 5771 - protein, 11 aa, synthetic construct
DQVWDEIVKKN

SEQ ID NO: 5772 - protein, 11 aa, synthetic construct
HDALIQLHEQR

SEQ ID NO: 5773 - protein, 11 aa, synthetic construct
KEKLEATINEL

SEQ ID NO: 5774 - protein, 11 aa, synthetic construct
QAELDRLRVET

SEQ ID NO: 5775 - protein, 11 aa, synthetic construct
HAISTEKIKAK

SEQ ID NO: 5776 - protein, 11 aa, synthetic construct
QVKAKHLKDSM

SEQ ID NO: 5777 - protein, 11 aa, synthetic construct
HSKLAESVEKA

SEQ ID NO: 5778 - protein, 11 aa, synthetic construct
SYDRLMKTIKE

SEQ ID NO: 5779 - protein, 11 aa, synthetic construct
ETDHFDIKNLK

SEQ ID NO: 5780 - protein, 11 aa, synthetic construct
NGKAADRIHQD

SEQ ID NO: 5781 - protein, 11 aa, synthetic construct
SDDIRKLLESQ

SEQ ID NO: 5782 - protein, 11 aa, synthetic construct
KTQMQEKAKEI

SEQ ID NO: 5783 - protein, 11 aa, synthetic construct
ADTIKKLTDKI

SEQ ID NO: 5784 - protein, 11 aa, synthetic construct
PDKTVKKVQDK

SEQ ID NO: 5785 - protein, 11 aa, synthetic construct
TLKQEYERDRD

SEQ ID NO: 5786 - protein, 11 aa, synthetic construct
RQKELEQRKLT

SEQ ID NO: 5787 - protein, 11 aa, synthetic construct
QAELKELLQKE

SEQ ID NO: 5788 - protein, 11 aa, synthetic construct
SDKIKKFLTES

SEQ ID NO: 5789 - protein, 11 aa, synthetic construct
KSDMEKLAKAT

SEQ ID NO: 5790 - protein, 11 aa, synthetic construct
IKKLKENIAQH

SEQ ID NO: 5791 - protein, 11 aa, synthetic construct
SSHLKAHLRTH

SEQ ID NO: 5792 - protein, 11 aa, synthetic construct
ELKSKLLDFRN

SEQ ID NO: 5793 - protein, 11 aa, synthetic construct
VDFLTDQRLRE

SEQ ID NO: 5794 - protein, 11 aa, synthetic construct
SERGRQLADHL

SEQ ID NO: 5795 - protein, 11 aa, synthetic construct
RISDKFTELKE

SEQ ID NO: 5796 - protein, 11 aa, synthetic construct
DRLIKSHIKTN

SEQ ID NO: 5797 - protein, 11 aa, synthetic construct
LKNWVRELRQH

SEQ ID NO: 5798 - protein, 11 aa, synthetic construct
KAHLAQHQKTH

SEQ ID NO: 5799 - protein, 11 aa, synthetic construct
DKADLDGQLTK

SEQ ID NO: 5800 - protein, 11 aa, synthetic construct
TDDKEKLLKTL

SEQ ID NO: 5801 - protein, 11 aa, synthetic construct
KSELKELINNE

SEQ ID NO: 5802 - protein, 11 aa, synthetic construct
IHRYIQEMNRK

SEQ ID NO: 5803 - protein, 11 aa, synthetic construct
PEQVERLTKEF

SEQ ID NO: 5804 - protein, 11 aa, synthetic construct
SSHLKAHTRTH

SEQ ID NO: 5805 - protein, 11 aa, synthetic construct
DEQVLEKVARQ

SEQ ID NO: 5806 - protein, 11 aa, synthetic construct
KSELKELLTRE

SEQ ID NO: 5807 - protein, 11 aa, synthetic construct
KNQKDVLKELL

SEQ ID NO: 5808 - protein, 11 aa, synthetic construct
GLEDKVSKQLE

SEQ ID NO: 5809 - protein, 11 aa, synthetic construct
ERKEMATILSK

SEQ ID NO: 5810 - protein, 11 aa, synthetic construct
SEDRLVNEKFR

SEQ ID NO: 5811 - protein, 11 aa, synthetic construct
REQYEKMQKDG

SEQ ID NO: 5812 - protein, 11 aa, synthetic construct
EKKLITDALNK

SEQ ID NO: 5813 - protein, 11 aa, synthetic construct
KTEINEALKKI

SEQ ID NO: 5814 - protein, 11 aa, synthetic construct
RQLEWGLERTR

SEQ ID NO: 5815 - protein, 11 aa, synthetic construct
TAHRLQLHDEH

SEQ ID NO: 5816 - protein, 11 aa, synthetic construct
DKDLTQLKKEA

SEQ ID NO: 5817 - protein, 11 aa, synthetic construct
DFHHETRVTLT

SEQ ID NO: 5818 - protein, 11 aa, synthetic construct
DDAAKKLQRYT

SEQ ID NO: 5819 - protein, 11 aa, synthetic construct
ASLVKELRERT

SEQ ID NO: 5820 - protein, 11 aa, synthetic construct
TTIHRIKQKEF

SEQ ID NO: 5821 - protein, 11 aa, synthetic construct
LPRVMKDSKNE

SEQ ID NO: 5822 - protein, 11 aa, synthetic construct
AHDRILKTIKT

SEQ ID NO: 5823 - protein, 11 aa, synthetic construct
LEDVSNFLKER

SEQ ID NO: 5824 - protein, 11 aa, synthetic construct
EDKLRTIANEN

SEQ ID NO: 5825 - protein, 11 aa, synthetic construct
VDKIRNQYRED

SEQ ID NO: 5826 - protein, 11 aa, synthetic construct
EKELSLLRNRK

SEQ ID NO: 5827 - protein, 11 aa, synthetic construct
NEKYQILARDH

SEQ ID NO: 5828 - protein, 11 aa, synthetic construct
ANDLLSKVKKD

SEQ ID NO: 5829 - protein, 11 aa, synthetic construct
HSIIKGIKDRT

SEQ ID NO: 5830 - protein, 11 aa, synthetic construct
PREQLMESIRK

SEQ ID NO: 5831 - protein, 11 aa, synthetic construct
ETQAKELAAHK

SEQ ID NO: 5832 - protein, 11 aa, synthetic construct
REKLLDTMNRL

SEQ ID NO: 5833 - protein, 11 aa, synthetic construct
DDFQQKIEKIK

SEQ ID NO: 5834 - protein, 11 aa, synthetic construct
RVHTSELKLRA

SEQ ID NO: 5835 - protein, 11 aa, synthetic construct
ETKLRETITRH

SEQ ID NO: 5836 - protein, 11 aa, synthetic construct
ISDLHQTLKKE

SEQ ID NO: 5837 - protein, 11 aa, synthetic construct
QHERLGTLVRE

SEQ ID NO: 5838 - protein, 11 aa, synthetic construct
DEFDAQMTKAK

SEQ ID NO: 5839 - protein, 11 aa, synthetic construct
VHEKWQKAIQK

SEQ ID NO: 5840 - protein, 11 aa, synthetic construct
DAKILNDVQDR

SEQ ID NO: 5841 - protein, 11 aa, synthetic construct
KSDMDKLAKAT

SEQ ID NO: 5842 - protein, 11 aa, synthetic construct
HVKETALKELN

SEQ ID NO: 5843 - protein, 11 aa, synthetic construct
LRSHDNFKAKL

SEQ ID NO: 5844 - protein, 11 aa, synthetic construct
EITRLVETFKK

SEQ ID NO: 5845 - protein, 11 aa, synthetic construct
HSTLEYKVKER

SEQ ID NO: 5846 - protein, 11 aa, synthetic construct
IHQYREQIKRV

SEQ ID NO: 5847 - protein, 11 aa, synthetic construct
RDLDRQKQKLE

SEQ ID NO: 5848 - protein, 11 aa, synthetic construct
KADIVRQLSER

SEQ ID NO: 5849 - protein, 11 aa, synthetic construct
KKAWENMVTKD

SEQ ID NO: 5850 - protein, 11 aa, synthetic construct
HKFIDTITDHM

SEQ ID NO: 5851 - protein, 11 aa, synthetic construct
PNDLKHYKKLS

SEQ ID NO: 5852 - protein, 11 aa, synthetic construct
RDQGKEMATKY

SEQ ID NO: 5853 - protein, 11 aa, synthetic construct
KGELKQLLTKE

SEQ ID NO: 5854 - protein, 11 aa, synthetic construct
PNDLKHLKKLS

SEQ ID NO: 5855 - protein, 11 aa, synthetic construct
ELKDQLENFRR

SEQ ID NO: 5856 - protein, 11 aa, synthetic construct
VQDLTRELNEK

SEQ ID NO: 5857 - protein, 11 aa, synthetic construct
RTSIDHLKEIA

SEQ ID NO: 5858 - protein, 11 aa, synthetic construct
KDKQLETMARL

SEQ ID NO: 5859 - protein, 11 aa, synthetic construct
LSRAKEFAQKH

SEQ ID NO: 5860 - protein, 11 aa, synthetic construct
LTDLVEHFKKT

SEQ ID NO: 5861 - protein, 11 aa, synthetic construct
FSENLKKAKEK

SEQ ID NO: 5862 - protein, 12 aa, synthetic construct
DKDLEVWNRLTS

SEQ ID NO: 5863 - protein, 12 aa, synthetic construct
QERLDAIVSRTR

SEQ ID NO: 5864 - protein, 12 aa, synthetic construct
VDEVKRQIDLAS

SEQ ID NO: 5865 - protein, 12 aa, synthetic construct
QTKIDAKKEQLA

SEQ ID NO: 5866 - protein, 12 aa, synthetic construct
DNDIQDIRNRIF

SEQ ID NO: 5867 - protein, 12 aa, synthetic construct
LSDFKELLRTVK

SEQ ID NO: 5868 - protein, 12 aa, synthetic construct
KEWEKKISEAIQ

SEQ ID NO: 5869 - protein, 12 aa, synthetic construct
GERFKENIRKVN

SEQ ID NO: 5870 - protein, 12 aa, synthetic construct
ERARTEFISSKL

SEQ ID NO: 5871 - protein, 12 aa, synthetic construct
DIHQYREQIKRV

SEQ ID NO: 5872 - protein, 12 aa, synthetic construct
LDTDYQMTKRDM

SEQ ID NO: 5873 - protein, 12 aa, synthetic construct
IDNVKSKIQDKE

SEQ ID NO: 5874 - protein, 12 aa, synthetic construct
KVLDAIIQEKKS

SEQ ID NO: 5875 - protein, 12 aa, synthetic construct
NAQVKDVEEKYS

SEQ ID NO: 5876 - protein, 12 aa, synthetic construct
HSQFIKLVAEKR

SEQ ID NO: 5877 - protein, 12 aa, synthetic construct
KDVLDELKNYIS

SEQ ID NO: 5878 - protein, 12 aa, synthetic construct
KKTIAAEDVLND

SEQ ID NO: 5879 - protein, 12 aa, synthetic construct
EEAKIIKQYVKN

SEQ ID NO: 5880 - protein, 12 aa, synthetic construct
VTAVKDSFERHL

SEQ ID NO: 5881 - protein, 12 aa, synthetic construct
KGTQGERIVEDY

SEQ ID NO: 5882 - protein, 12 aa, synthetic construct
GTHTKELDLWKS

SEQ ID NO: 5883 - protein, 12 aa, synthetic construct
YDEIKDVVTKLS

SEQ ID NO: 5884 - protein, 12 aa, synthetic construct
QEYVRETIDKLM

SEQ ID NO: 5885 - protein, 12 aa, synthetic construct
KDHLDLLSKSAY

SEQ ID NO: 5886 - protein, 12 aa, synthetic construct
KESIKKALELTM

SEQ ID NO: 5887 - protein, 12 aa, synthetic construct
DGLEVAKTIRKT

SEQ ID NO: 5888 - protein, 12 aa, synthetic construct
HDSIKMFIKNAK

SEQ ID NO: 5889 - protein, 12 aa, synthetic construct
FKNIDDLNKVLK

SEQ ID NO: 5890 - protein, 12 aa, synthetic construct
PQDIQAFRELDK

SEQ ID NO: 5891 - protein, 12 aa, synthetic construct
LKEKENNDSSDK

SEQ ID NO: 5892 - protein, 12 aa, synthetic construct
RDKVNDIVDQVI

SEQ ID NO: 5893 - protein, 12 aa, synthetic construct
RKQFEKTMETSS

SEQ ID NO: 5894 - protein, 12 aa, synthetic construct
QDKLDKIIQRTR

SEQ ID NO: 5895 - protein, 12 aa, synthetic construct
EKETKEMVAFLN

SEQ ID NO: 5896 - protein, 12 aa, synthetic construct
TKDLKKLIWNEI

SEQ ID NO: 5897 - protein, 12 aa, synthetic construct
TKEREQVIAHLG

SEQ ID NO: 5898 - protein, 12 aa, synthetic construct
NEEWDLLISGKK

SEQ ID NO: 5899 - protein, 12 aa, synthetic construct
ETTERLLKQAVE

SEQ ID NO: 5900 - protein, 12 aa, synthetic construct
DSTRQRIVELAH

SEQ ID NO: 5901 - protein, 12 aa, synthetic construct
DRDTLKNLGDRL

SEQ ID NO: 5902 - protein, 12 aa, synthetic construct
LAHLRAHQRTHT

SEQ ID NO: 5903 - protein, 12 aa, synthetic construct
LAEVSQRHAEKL

SEQ ID NO: 5904 - protein, 12 aa, synthetic construct
AASFLTRMKEKH

SEQ ID NO: 5905 - protein, 12 aa, synthetic construct
ADREKQIITHLN

SEQ ID NO: 5906 - protein, 12 aa, synthetic construct
MESTFERIKELS

SEQ ID NO: 5907 - protein, 12 aa, synthetic construct
ELQRLFRDAHMT

SEQ ID NO: 5908 - protein, 12 aa, synthetic construct
EHRALRKVVSSA

SEQ ID NO: 5909 - protein, 12 aa, synthetic construct
GEQRKTFVELMR

SEQ ID NO: 5910 - protein, 12 aa, synthetic construct
SEKIQKEVESLI

SEQ ID NO: 5911 - protein, 12 aa, synthetic construct
ISKVREMQKWLE

SEQ ID NO: 5912 - protein, 12 aa, synthetic construct
TQERDRLIDDFR

SEQ ID NO: 5913 - protein, 12 aa, synthetic construct
DAQRQATKDAGR

SEQ ID NO: 5914 - protein, 12 aa, synthetic construct
EDRMELYQTRLS

SEQ ID NO: 5915 - protein, 12 aa, synthetic construct
TSELREAMRKLL

SEQ ID NO: 5916 - protein, 12 aa, synthetic construct
TVEAYKTIAREE

SEQ ID NO: 5917 - protein, 12 aa, synthetic construct
KASLNWHMKKHD

SEQ ID NO: 5918 - protein, 12 aa, synthetic construct
DDVKSIVRFVQE

SEQ ID NO: 5919 - protein, 12 aa, synthetic construct
PTVRELKETLEN

SEQ ID NO: 5920 - protein, 12 aa, synthetic construct
ENVTELKKNFNR

SEQ ID NO: 5921 - protein, 12 aa, synthetic construct
RHDILSAFDTRI

SEQ ID NO: 5922 - protein, 12 aa, synthetic construct
TDSRNVDDYVRK

SEQ ID NO: 5923 - protein, 12 aa, synthetic construct
REGYEKLKQELN

SEQ ID NO: 5924 - protein, 12 aa, synthetic construct
IYQQVRDELKRA

SEQ ID NO: 5925 - protein, 12 aa, synthetic construct
SDHLAEHQRTHT

SEQ ID NO: 5926 - protein, 12 aa, synthetic construct
HWGDRSADMATR

SEQ ID NO: 5927 - protein, 12 aa, synthetic construct
KSGQLLHELLKE

SEQ ID NO: 5928 - protein, 12 aa, synthetic construct
EALSKLLERIKQ

SEQ ID NO: 5929 - protein, 12 aa, synthetic construct
RDLTDLMAKNME

SEQ ID NO: 5930 - protein, 12 aa, synthetic construct
RYDTLVSVLERE

SEQ ID NO: 5931 - protein, 12 aa, synthetic construct
QKEIDRLNEVAK

SEQ ID NO: 5932 - protein, 12 aa, synthetic construct
ESLVEKVKEFLS

SEQ ID NO: 5933 - protein, 12 aa, synthetic construct
KEDALKLVQLKQ

SEQ ID NO: 5934 - protein, 12 aa, synthetic construct
VEQLRKEGNELF

SEQ ID NO: 5935 - protein, 12 aa, synthetic construct
KTQMQEKAKEIY

SEQ ID NO: 5936 - protein, 12 aa, synthetic construct
LNTKVEVLREVE

SEQ ID NO: 5937 - protein, 12 aa, synthetic construct
QLKSVIKKYREE

SEQ ID NO: 5938 - protein, 12 aa, synthetic construct
TSKWIDDVRTER

SEQ ID NO: 5939 - protein, 12 aa, synthetic construct
KDEIDSKLVNFI

SEQ ID NO: 5940 - protein, 12 aa, synthetic construct
SDMRTEIIRMME

SEQ ID NO: 5941 - protein, 12 aa, synthetic construct
TTKWIDDVRTER

SEQ ID NO: 5942 - protein, 12 aa, synthetic construct
EIHLENMLKITR

SEQ ID NO: 5943 - protein, 12 aa, synthetic construct
RLDLDFHQRVHT

SEQ ID NO: 5944 - protein, 12 aa, synthetic construct
KSQLIIHERIHT

SEQ ID NO: 5945 - protein, 12 aa, synthetic construct
SVERYIVSRLRD

SEQ ID NO: 5946 - protein, 12 aa, synthetic construct
KHDVETFRQLIG

SEQ ID NO: 5947 - protein, 12 aa, synthetic construct
YEKARTLIEKVS

SEQ ID NO: 5948 - protein, 12 aa, synthetic construct
ELSDRVLRAAKQ

SEQ ID NO: 5949 - protein, 12 aa, synthetic construct
KDQLMEKYRKIT

SEQ ID NO: 5950 - protein, 12 aa, synthetic construct
PERELTETREKL

SEQ ID NO: 5951 - protein, 12 aa, synthetic construct
ELKELIRKHQND

SEQ ID NO: 5952 - protein, 12 aa, synthetic construct
FDDIKKIISKQL

SEQ ID NO: 5953 - protein, 12 aa, synthetic construct
ITRDSVIRIAKD

SEQ ID NO: 5954 - protein, 12 aa, synthetic construct
WKDAIKEMKQTI

SEQ ID NO: 5955 - protein, 12 aa, synthetic construct
ESAVRVVERLNR

SEQ ID NO: 5956 - protein, 12 aa, synthetic construct
DLKALSSALHER

SEQ ID NO: 5957 - protein, 12 aa, synthetic construct
VDRGTELLERSL

SEQ ID NO: 5958 - protein, 12 aa, synthetic construct
GETHRHRKQMFM

SEQ ID NO: 5959 - protein, 12 aa, synthetic construct
KETENKIIKDYK

SEQ ID NO: 5960 - protein, 12 aa, synthetic construct
KDKLLSFLDTHL

SEQ ID NO: 5961 - protein, 12 aa, synthetic construct
EIAKETQARVLE

SEQ ID NO: 5962 - protein, 12 aa, synthetic construct
YTERDRIQRERL

SEQ ID NO: 5963 - protein, 12 aa, synthetic construct
DTERAQLDVMKL

SEQ ID NO: 5964 - protein, 12 aa, synthetic construct
LTLLEKTLKERL

SEQ ID NO: 5965 - protein, 12 aa, synthetic construct
RKITDDLVKNVE

SEQ ID NO: 5966 - protein, 12 aa, synthetic construct
QETIKHVKDLIA

SEQ ID NO: 5967 - protein, 12 aa, synthetic construct
TDVDQKVDQVAR

SEQ ID NO: 5968 - protein, 12 aa, synthetic construct
SDITDEQKKVRE

SEQ ID NO: 5969 - protein, 12 aa, synthetic construct
ENSRVLVKKLAE

SEQ ID NO: 5970 - protein, 12 aa, synthetic construct
TDTALKELEKVT

SEQ ID NO: 5971 - protein, 12 aa, synthetic construct
HKFIDTITDHMT

SEQ ID NO: 5972 - protein, 12 aa, synthetic construct
DETLAKIKKAWN

SEQ ID NO: 5973 - protein, 12 aa, synthetic construct
KGTQADRIVEKY

SEQ ID NO: 5974 - protein, 12 aa, synthetic construct
TGRIYSDVLRKE

SEQ ID NO: 5975 - protein, 12 aa, synthetic construct
NEDFVRLSTEAR

SEQ ID NO: 5976 - protein, 12 aa, synthetic construct
PRFQELKSETLK

SEQ ID NO: 5977 - protein, 12 aa, synthetic construct
ARAQAKQLEHLK

SEQ ID NO: 5978 - protein, 12 aa, synthetic construct
EVSINDARVRAR

SEQ ID NO: 5979 - protein, 12 aa, synthetic construct
EFKLTSAIKKEL

SEQ ID NO: 5980 - protein, 12 aa, synthetic construct
KETSDLLRKIAA

SEQ ID NO: 5981 - protein, 12 aa, synthetic construct
EHTSDRKLLAKE

SEQ ID NO: 5982 - protein, 12 aa, synthetic construct
KDKTKGDAIDLS

SEQ ID NO: 5983 - protein, 12 aa, synthetic construct
ETATRDQLTKEA

SEQ ID NO: 5984 - protein, 12 aa, synthetic construct
PEDKTTVHRKWS

SEQ ID NO: 5985 - protein, 12 aa, synthetic construct
MNEGARHMREFT

SEQ ID NO: 5986 - protein, 12 aa, synthetic construct
REKDLSWITQHA

SEQ ID NO: 5987 - protein, 12 aa, synthetic construct
DQVKEEMKILVQ

SEQ ID NO: 5988 - protein, 12 aa, synthetic construct
EDDLTKVLNYTK

SEQ ID NO: 5989 - protein, 12 aa, synthetic construct
ERANELVESYRK

SEQ ID NO: 5990 - protein, 12 aa, synthetic construct
RTSIDHLKEIAR

SEQ ID NO: 5991 - protein, 12 aa, synthetic construct
KDDLARIITAES

SEQ ID NO: 5992 - protein, 12 aa, synthetic construct
SKLLRDSHVLHS

SEQ ID NO: 5993 - protein, 12 aa, synthetic construct
ATDLKETAKKLL

SEQ ID NO: 5994 - protein, 12 aa, synthetic construct
RTTRELVGDLLD

SEQ ID NO: 5995 - protein, 12 aa, synthetic construct
NSTIDKRVERLI

SEQ ID NO: 5996 - protein, 12 aa, synthetic construct
PSKYRDELTAKL

SEQ ID NO: 5997 - protein, 12 aa, synthetic construct
EKEYKELRNAIS

SEQ ID NO: 5998 - protein, 12 aa, synthetic construct
EKTLRDKLVLAT

SEQ ID NO: 5999 - protein, 12 aa, synthetic construct
LFDRLDEHARQN

SEQ ID NO: 6000 - protein, 12 aa, synthetic construct
LDTDYQMTKKDM

SEQ ID NO: 6001 - protein, 12 aa, synthetic construct
RKHEQMFREAVN

SEQ ID NO: 6002 - protein, 12 aa, synthetic construct
KESLEALDAAKT

SEQ ID NO: 6003 - protein, 12 aa, synthetic construct
HDVYRDEALNNR

SEQ ID NO: 6004 - protein, 12 aa, synthetic construct
EKDIENFMKNEK

SEQ ID NO: 6005 - protein, 12 aa, synthetic construct
DFNLRTHVRIHT

SEQ ID NO: 6006 - protein, 12 aa, synthetic construct
ATQVEEKLRAEY

SEQ ID NO: 6007 - protein, 12 aa, synthetic construct
KVTHFERLHHKT

SEQ ID NO: 6008 - protein, 12 aa, synthetic construct
KEELELANWISK

SEQ ID NO: 6009 - protein, 12 aa, synthetic construct
HDIYRDEALNNR

SEQ ID NO: 6010 - protein, 12 aa, synthetic construct
RDELNAYKSKLK

SEQ ID NO: 6011 - protein, 12 aa, synthetic construct
IENVKAKIQDKL

SEQ ID NO: 6012 - protein, 12 aa, synthetic construct
PEDKVKAVTKLN

SEQ ID NO: 6013 - protein, 12 aa, synthetic construct
KTVEEIDQKLKS

SEQ ID NO: 6014 - protein, 12 aa, synthetic construct
KDRLVESVQDVL

SEQ ID NO: 6015 - protein, 12 aa, synthetic construct
KQERTLFKELIK

SEQ ID NO: 6016 - protein, 12 aa, synthetic construct
EKVVSELKQLAE

SEQ ID NO: 6017 - protein, 12 aa, synthetic construct
QEKLDAMVERTR

SEQ ID NO: 6018 - protein, 12 aa, synthetic construct
MKTRFKIQHATE

SEQ ID NO: 6019 - protein, 12 aa, synthetic construct
QYIEGEMRTRIR

SEQ ID NO: 6020 - protein, 12 aa, synthetic construct
SVTRVKIALEEK

SEQ ID NO: 6021 - protein, 12 aa, synthetic construct
MRDASQWIKRME

SEQ ID NO: 6022 - protein, 12 aa, synthetic construct
RKDRDTARQLHE

SEQ ID NO: 6023 - protein, 12 aa, synthetic construct
HELNSKIKDLET

SEQ ID NO: 6024 - protein, 12 aa, synthetic construct
DGTRLLDSIRDL

SEQ ID NO: 6025 - protein, 12 aa, synthetic construct
LIDVYKKTLKSD

SEQ ID NO: 6026 - protein, 12 aa, synthetic construct
KERLKELIFQET

SEQ ID NO: 6027 - protein, 12 aa, synthetic construct
SRINEARKEVEM

SEQ ID NO: 6028 - protein, 12 aa, synthetic construct
PDDIAELKTRLT

SEQ ID NO: 6029 - protein, 12 aa, synthetic construct
HLDQLKEIMKVT

SEQ ID NO: 6030 - protein, 12 aa, synthetic construct
REMVDQINRVAR

SEQ ID NO: 6031 - protein, 12 aa, synthetic construct
HSKYREEAMQNR

SEQ ID NO: 6032 - protein, 12 aa, synthetic construct
ADTIKKLTDKIK

SEQ ID NO: 6033 - protein, 12 aa, synthetic construct
KIVELENEFLKS

SEQ ID NO: 6034 - protein, 12 aa, synthetic construct
LDDFNREIVKQL

SEQ ID NO: 6035 - protein, 12 aa, synthetic construct
ISSYKEKLEKEH

SEQ ID NO: 6036 - protein, 12 aa, synthetic construct
LRKQLSLDVLDK

SEQ ID NO: 6037 - protein, 12 aa, synthetic construct
REEFTKKVRTNA

SEQ ID NO: 6038 - protein, 12 aa, synthetic construct
KEEKSAIRDYTK

SEQ ID NO: 6039 - protein, 12 aa, synthetic construct
LDKVLSKLSEKY

SEQ ID NO: 6040 - protein, 12 aa, synthetic construct
EKTAEDFTPTVR

SEQ ID NO: 6041 - protein, 12 aa, synthetic construct
SIDKSELLYKVD

SEQ ID NO: 6042 - protein, 12 aa, synthetic construct
KRIIKETEKLVS

SEQ ID NO: 6043 - protein, 12 aa, synthetic construct
TAEEFANRLSKD

SEQ ID NO: 6044 - protein, 12 aa, synthetic construct
LDNLRDTVRKFL

SEQ ID NO: 6045 - protein, 12 aa, synthetic construct
EKAKNRLNTELY

SEQ ID NO: 6046 - protein, 12 aa, synthetic construct
APEHTRLRKLVT

SEQ ID NO: 6047 - protein, 12 aa, synthetic construct
QHSAELIKHLIK

SEQ ID NO: 6048 - protein, 12 aa, synthetic construct
KEQKTQRLISEL

SEQ ID NO: 6049 - protein, 12 aa, synthetic construct
KDHFVKLETIDS

SEQ ID NO: 6050 - protein, 12 aa, synthetic construct
REMLASIDTLKD

SEQ ID NO: 6051 - protein, 12 aa, synthetic construct
ADEIKTAIDTAR

SEQ ID NO: 6052 - protein, 12 aa, synthetic construct
LSEKEALIKQIK

SEQ ID NO: 6053 - protein, 12 aa, synthetic construct
KDQEIKKLVDQN

SEQ ID NO: 6054 - protein, 12 aa, synthetic construct
ENLKRYVERMES

SEQ ID NO: 6055 - protein, 12 aa, synthetic construct
QSTLDKLMRDLD

SEQ ID NO: 6056 - protein, 12 aa, synthetic construct
AKDIADAVRKTS

SEQ ID NO: 6057 - protein, 12 aa, synthetic construct
DNALRKSHHAGM

SEQ ID NO: 6058 - protein, 12 aa, synthetic construct
DEVTNGIVKERL

SEQ ID NO: 6059 - protein, 12 aa, synthetic construct
KDITQKYRTILD

SEQ ID NO: 6060 - protein, 12 aa, synthetic construct
IENVKAKIQDKI

SEQ ID NO: 6061 - protein, 12 aa, synthetic construct
KDTVEKVRQTFE

SEQ ID NO: 6062 - protein, 12 aa, synthetic construct
EDRVKEVVTKYS

SEQ ID NO: 6063 - protein, 12 aa, synthetic construct
QMERVRTLTDVR

SEQ ID NO: 6064 - protein, 12 aa, synthetic construct
LKERYQKIGDTK

SEQ ID NO: 6065 - protein, 12 aa, synthetic construct
SKENMSLLKHLK

SEQ ID NO: 6066 - protein, 12 aa, synthetic construct
KGTQAERIVEKY

SEQ ID NO: 6067 - protein, 12 aa, synthetic construct
KGTQGEKIVEDY

SEQ ID NO: 6068 - protein, 12 aa, synthetic construct
RKESHLEKQKID

SEQ ID NO: 6069 - protein, 12 aa, synthetic construct
ASADAERLHRSM

SEQ ID NO: 6070 - protein, 12 aa, synthetic construct
KIGKEHINRITN

SEQ ID NO: 6071 - protein, 12 aa, synthetic construct
KESLLREVQLLK

SEQ ID NO: 6072 - protein, 12 aa, synthetic construct
RVRNQFLKEMDG

SEQ ID NO: 6073 - protein, 12 aa, synthetic construct
RADIMTKLNEDF

SEQ ID NO: 6074 - protein, 12 aa, synthetic construct
SRGRDLLTDWLK

SEQ ID NO: 6075 - protein, 12 aa, synthetic construct
PDRLAQIVERTR

SEQ ID NO: 6076 - protein, 12 aa, synthetic construct
SDKLQKEVEGLV

SEQ ID NO: 6077 - protein, 12 aa, synthetic construct
PKTQLLHFIREE

SEQ ID NO: 6078 - protein, 12 aa, synthetic construct
NEYRHLQHSIKE

SEQ ID NO: 6079 - protein, 12 aa, synthetic construct
KWVQDSMDHLDK

SEQ ID NO: 6080 - protein, 12 aa, synthetic construct
QFELLERANHKL

SEQ ID NO: 6081 - protein, 12 aa, synthetic construct
DMRTEVIRMMES

SEQ ID NO: 6082 - protein, 12 aa, synthetic construct
KQREVLLKTLYH

SEQ ID NO: 6083 - protein, 12 aa, synthetic construct
RETMLEVVERTA

SEQ ID NO: 6084 - protein, 12 aa, synthetic construct
ENEAFKIDTRIG

SEQ ID NO: 6085 - protein, 12 aa, synthetic construct
AETIDKLVERTR

SEQ ID NO: 6086 - protein, 12 aa, synthetic construct
KVDMAREISKQL

SEQ ID NO: 6087 - protein, 12 aa, synthetic construct
QRDREEALHQFR

SEQ ID NO: 6088 - protein, 12 aa, synthetic construct
YDEMVETMRKIS

SEQ ID NO: 6089 - protein, 12 aa, synthetic construct
KSEKEAIVSYTK

SEQ ID NO: 6090 - protein, 12 aa, synthetic construct
DAKARDVVNRLT

SEQ ID NO: 6091 - protein, 12 aa, synthetic construct
DDVQKVFQVAKE

SEQ ID NO: 6092 - protein, 12 aa, synthetic construct
KKQDDNLEHFIS

SEQ ID NO: 6093 - protein, 12 aa, synthetic construct
NVTFRKELEKIL

SEQ ID NO: 6094 - protein, 12 aa, synthetic construct
IQGKVDEVFRKQ

SEQ ID NO: 6095 - protein, 12 aa, synthetic construct
EDKAVELYSRTA

SEQ ID NO: 6096 - protein, 12 aa, synthetic construct
DEQRKLLKEAQA

SEQ ID NO: 6097 - protein, 12 aa, synthetic construct
PTIIKDHLKKAN

SEQ ID NO: 6098 - protein, 12 aa, synthetic construct
ELKKLELLRQNA

SEQ ID NO: 6099 - protein, 12 aa, synthetic construct
ETIKLLEKILES

SEQ ID NO: 6100 - protein, 12 aa, synthetic construct
TDNVVEKLRKKY

SEQ ID NO: 6101 - protein, 12 aa, synthetic construct
VDEALKDAQTRI

SEQ ID NO: 6102 - protein, 12 aa, synthetic construct
KVFETLEARMTE

SEQ ID NO: 6103 - protein, 12 aa, synthetic construct
ARDVLDNLFEKT

SEQ ID NO: 6104 - protein, 12 aa, synthetic construct
PVLDRVLENNHR

SEQ ID NO: 6105 - protein, 12 aa, synthetic construct
DFSNQLRAELEK

SEQ ID NO: 6106 - protein, 12 aa, synthetic construct
DKERSIISDIFS

SEQ ID NO: 6107 - protein, 12 aa, synthetic construct
EEHTYLHAQRQK

SEQ ID NO: 6108 - protein, 12 aa, synthetic construct
RDLRKAMQQTLE

SEQ ID NO: 6109 - protein, 12 aa, synthetic construct
KSELDAYTKKLV

SEQ ID NO: 6110 - protein, 12 aa, synthetic construct
EKDRNDLITYLK

SEQ ID NO: 6111 - protein, 12 aa, synthetic construct
TRKLSETVLEDV

SEQ ID NO: 6112 - protein, 12 aa, synthetic construct
DEMVETMRKISG

SEQ ID NO: 6113 - protein, 12 aa, synthetic construct
SDKIKKFLTESH

SEQ ID NO: 6114 - protein, 12 aa, synthetic construct
KETKALADFIRN

SEQ ID NO: 6115 - protein, 12 aa, synthetic construct
LSELENFKKELA

SEQ ID NO: 6116 - protein, 12 aa, synthetic construct
RVEKTLELIKQA

SEQ ID NO: 6117 - protein, 12 aa, synthetic construct
HEQKTRYLPRVA

SEQ ID NO: 6118 - protein, 12 aa, synthetic construct
KDVYEKTESIMG

SEQ ID NO: 6119 - protein, 12 aa, synthetic construct
YSHRAAQRERLA

SEQ ID NO: 6120 - protein, 12 aa, synthetic construct
SDHLTTHIRTHT

SEQ ID NO: 6121 - protein, 12 aa, synthetic construct
PSGTFVREKIRE

SEQ ID NO: 6122 - protein, 12 aa, synthetic construct
NDKRVHRLLTVL

SEQ ID NO: 6123 - protein, 12 aa, synthetic construct
ADELSNAKKVRA

SEQ ID NO: 6124 - protein, 12 aa, synthetic construct
TEKAWEVLTKAR

SEQ ID NO: 6125 - protein, 12 aa, synthetic construct
IIDKLYEKVSKN

SEQ ID NO: 6126 - protein, 12 aa, synthetic construct
EKSLTDAVKLAH

SEQ ID NO: 6127 - protein, 12 aa, synthetic construct
EDIARKEQLKSL

SEQ ID NO: 6128 - protein, 12 aa, synthetic construct
KSDKDAIVNAWK

SEQ ID NO: 6129 - protein, 12 aa, synthetic construct
EKLNQLWEKAQR

SEQ ID NO: 6130 - protein, 12 aa, synthetic construct
PLEFLRANQRKH

SEQ ID NO: 6131 - protein, 12 aa, synthetic construct
TDSAEGVRKFIR

SEQ ID NO: 6132 - protein, 12 aa, synthetic construct
EADITAIKRLSD

SEQ ID NO: 6133 - protein, 12 aa, synthetic construct
QEDLDKIFINVR

SEQ ID NO: 6134 - protein, 12 aa, synthetic construct
SNRHKEFENQIR

SEQ ID NO: 6135 - protein, 12 aa, synthetic construct
QKELLEVMDQLR

SEQ ID NO: 6136 - protein, 12 aa, synthetic construct
REALARLETLDT

SEQ ID NO: 6137 - protein, 12 aa, synthetic construct
KSLLKIINDYEE

SEQ ID NO: 6138 - protein, 12 aa, synthetic construct
INHAIRQAYEDK

SEQ ID NO: 6139 - protein, 12 aa, synthetic construct
EKAEKIKNLFNE

SEQ ID NO: 6140 - protein, 12 aa, synthetic construct
KHFRTREVAITQ

SEQ ID NO: 6141 - protein, 12 aa, synthetic construct
ISARIKEELLKN

SEQ ID NO: 6142 - protein, 12 aa, synthetic construct
SSLKDIDIAREN

SEQ ID NO: 6143 - protein, 12 aa, synthetic construct
TLKVLRHHQEKL

SEQ ID NO: 6144 - protein, 12 aa, synthetic construct
KEDIARKEQLKS

SEQ ID NO: 6145 - protein, 12 aa, synthetic construct
TLVKVKDAEDQL

SEQ ID NO: 6146 - protein, 13 aa, synthetic construct
GDLIRAIQETHDR

SEQ ID NO: 6147 - protein, 13 aa, synthetic construct
LDNMREVVERNRA

SEQ ID NO: 6148 - protein, 13 aa, synthetic construct
PHQEKLLKILAKT

SEQ ID NO: 6149 - protein, 13 aa, synthetic construct
KITQDAAEAIKKY

SEQ ID NO: 6150 - protein, 13 aa, synthetic construct
LEKTHELKEVLNK

SEQ ID NO: 6151 - protein, 13 aa, synthetic construct
DATKAANDALLKE

SEQ ID NO: 6152 - protein, 13 aa, synthetic construct
NGLEQAKKFHEAV

SEQ ID NO: 6153 - protein, 13 aa, synthetic construct
RSDVLDAAVTRKI

SEQ ID NO: 6154 - protein, 13 aa, synthetic construct
VVADSMQRHARKY

SEQ ID NO: 6155 - protein, 13 aa, synthetic construct
ESAVRVVERLNRQ

SEQ ID NO: 6156 - protein, 13 aa, synthetic construct
DRDTETLVHWIRK

SEQ ID NO: 6157 - protein, 13 aa, synthetic construct
TVLVHRVHSYLER

SEQ ID NO: 6158 - protein, 13 aa, synthetic construct
EEYLTSLGRKHRA

SEQ ID NO: 6159 - protein, 13 aa, synthetic construct
SYELERVVRQLEN

SEQ ID NO: 6160 - protein, 13 aa, synthetic construct
VNHLVDNTRKLEE

SEQ ID NO: 6161 - protein, 13 aa, synthetic construct
VEKAETLRKWLNE

SEQ ID NO: 6162 - protein, 13 aa, synthetic construct
QDKVVELVDIMQK

SEQ ID NO: 6163 - protein, 13 aa, synthetic construct
SIHRHTVVKLAHT

SEQ ID NO: 6164 - protein, 13 aa, synthetic construct
VTDVTTKAKQLKD

SEQ ID NO: 6165 - protein, 13 aa, synthetic construct
VDEVRKIFRQLAS

SEQ ID NO: 6166 - protein, 13 aa, synthetic construct
ETITLKKLEEWKN

SEQ ID NO: 6167 - protein, 13 aa, synthetic construct
LRKQLSLDVLDKL

SEQ ID NO: 6168 - protein, 13 aa, synthetic construct
EQADRIVKFAKAN

SEQ ID NO: 6169 - protein, 13 aa, synthetic construct
ADERAKINQIIFE

SEQ ID NO: 6170 - protein, 13 aa, synthetic construct
RYQKERIENVARE

SEQ ID NO: 6171 - protein, 13 aa, synthetic construct
KDSDDDLVYRSLK

SEQ ID NO: 6172 - protein, 13 aa, synthetic construct
PESVLKVAHHASE

SEQ ID NO: 6173 - protein, 13 aa, synthetic construct
KHEAQRLEQEARG

SEQ ID NO: 6174 - protein, 13 aa, synthetic construct
KHLVEQLIRDLKT

SEQ ID NO: 6175 - protein, 13 aa, synthetic construct
ENSLKTAQKVHTE

SEQ ID NO: 6176 - protein, 13 aa, synthetic construct
PRNNLKRILKEME

SEQ ID NO: 6177 - protein, 13 aa, synthetic construct
EDQINKLVELVKS

SEQ ID NO: 6178 - protein, 13 aa, synthetic construct
AQADLLNLKRKVD

SEQ ID NO: 6179 - protein, 13 aa, synthetic construct
DEQRKLLKEAQAE

SEQ ID NO: 6180 - protein, 13 aa, synthetic construct
MDITMFKEDLKSH

SEQ ID NO: 6181 - protein, 13 aa, synthetic construct
DGTIKKWQDIARK

SEQ ID NO: 6182 - protein, 13 aa, synthetic construct
VDRINDRLQAIDT

SEQ ID NO: 6183 - protein, 13 aa, synthetic construct
KDEVERKMKSLLN

SEQ ID NO: 6184 - protein, 13 aa, synthetic construct
VESLNRADREAQA

SEQ ID NO: 6185 - protein, 13 aa, synthetic construct
PTVRELKETLENS

SEQ ID NO: 6186 - protein, 13 aa, synthetic construct
PKELLDRATTLLE

SEQ ID NO: 6187 - protein, 13 aa, synthetic construct
EEALSKLLERIKQ

SEQ ID NO: 6188 - protein, 13 aa, synthetic construct
KTELIQKAKLAEQ

SEQ ID NO: 6189 - protein, 13 aa, synthetic construct
EKLNQLWEKAQRL

SEQ ID NO: 6190 - protein, 13 aa, synthetic construct
TKTIAIYDKLKEL

SEQ ID NO: 6191 - protein, 13 aa, synthetic construct
PDFRDELTQAAKK

SEQ ID NO: 6192 - protein, 13 aa, synthetic construct
LDFKKELEQKVKQ

SEQ ID NO: 6193 - protein, 13 aa, synthetic construct
VEVKSVVDFIQKH

SEQ ID NO: 6194 - protein, 13 aa, synthetic construct
NEIRKKIYQKISE

SEQ ID NO: 6195 - protein, 13 aa, synthetic construct
ISKVRHMQEWLET

SEQ ID NO: 6196 - protein, 13 aa, synthetic construct
EDVREKLQASLKN

SEQ ID NO: 6197 - protein, 13 aa, synthetic construct
PKDQEIKKLVDQN

SEQ ID NO: 6198 - protein, 13 aa, synthetic construct
DEHKLLFRVLTNL

SEQ ID NO: 6199 - protein, 13 aa, synthetic construct
TTKELIKKLAEIN

SEQ ID NO: 6200 - protein, 13 aa, synthetic construct
SEDVDIIFTRLKG

SEQ ID NO: 6201 - protein, 13 aa, synthetic construct
EDFVKALSDAKQR

SEQ ID NO: 6202 - protein, 13 aa, synthetic construct
MKETQEMLDFAAK

SEQ ID NO: 6203 - protein, 13 aa, synthetic construct
HLTRAVDRALARS

SEQ ID NO: 6204 - protein, 13 aa, synthetic construct
ETTLKRLGATHLR

SEQ ID NO: 6205 - protein, 13 aa, synthetic construct
HSKYREEAMQNRI

SEQ ID NO: 6206 - protein, 13 aa, synthetic construct
EAARQDAQQYRKT

SEQ ID NO: 6207 - protein, 13 aa, synthetic construct
DTTLKRLGATHLK

SEQ ID NO: 6208 - protein, 13 aa, synthetic construct
YQKEIVDKHNALR

SEQ ID NO: 6209 - protein, 13 aa, synthetic construct
HTQVIELERKFSH

SEQ ID NO: 6210 - protein, 13 aa, synthetic construct
DAERERFRNLTQE

SEQ ID NO: 6211 - protein, 13 aa, synthetic construct
KVQLKELEREYAT

SEQ ID NO: 6212 - protein, 13 aa, synthetic construct
PEQKKVNQVLKEF

SEQ ID NO: 6213 - protein, 13 aa, synthetic construct
EKIIKEFIQKTLT

SEQ ID NO: 6214 - protein, 13 aa, synthetic construct
HKTIDRFIALTKT

SEQ ID NO: 6215 - protein, 13 aa, synthetic construct
ALKDEALKTFVEQ

SEQ ID NO: 6216 - protein, 13 aa, synthetic construct
PKLTEALKEQVEK

SEQ ID NO: 6217 - protein, 13 aa, synthetic construct
KAVEQVKSDFNKL

SEQ ID NO: 6218 - protein, 13 aa, synthetic construct
VESLRKLVDHLIN

SEQ ID NO: 6219 - protein, 13 aa, synthetic construct
DQDSNRLSDALTK

SEQ ID NO: 6220 - protein, 13 aa, synthetic construct
KEMYNEIIRVLKN

SEQ ID NO: 6221 - protein, 13 aa, synthetic construct
DGDLRATIQALHH

SEQ ID NO: 6222 - protein, 13 aa, synthetic construct
VEMKSEFLATKAK

SEQ ID NO: 6223 - protein, 13 aa, synthetic construct
AETLMDRIKKQLR

SEQ ID NO: 6224 - protein, 13 aa, synthetic construct
AALETHAQALRER

SEQ ID NO: 6225 - protein, 13 aa, synthetic construct
REKRVSNAVEFLL

SEQ ID NO: 6226 - protein, 13 aa, synthetic construct
RELTSLLKELLEM

SEQ ID NO: 6227 - protein, 13 aa, synthetic construct
THEAVHLTAHAKE

SEQ ID NO: 6228 - protein, 13 aa, synthetic construct
LDELQLFTDAIRK

SEQ ID NO: 6229 - protein, 13 aa, synthetic construct
RDSLGALSKALKE

SEQ ID NO: 6230 - protein, 13 aa, synthetic construct
SDERAAVYRAIET

SEQ ID NO: 6231 - protein, 13 aa, synthetic construct
SKGAQDLARAIKD

SEQ ID NO: 6232 - protein, 13 aa, synthetic construct
DEIRNEAHQLLKL

SEQ ID NO: 6233 - protein, 13 aa, synthetic construct
PRTNERIFELLLR

SEQ ID NO: 6234 - protein, 13 aa, synthetic construct
LKEAVELAKFTTD

SEQ ID NO: 6235 - protein, 13 aa, synthetic construct
HSLNVKLVKELAK

SEQ ID NO: 6236 - protein, 13 aa, synthetic construct
HKNVMRMVNHEVS

SEQ ID NO: 6237 - protein, 13 aa, synthetic construct
PENAIKRADELIS

SEQ ID NO: 6238 - protein, 13 aa, synthetic construct
LKQFKNDLKHVLQ

SEQ ID NO: 6239 - protein, 13 aa, synthetic construct
QRVISHVEAEAKI

SEQ ID NO: 6240 - protein, 13 aa, synthetic construct
TDKLRGEALDLQH

SEQ ID NO: 6241 - protein, 13 aa, synthetic construct
DRVNEAAQFARSK

SEQ ID NO: 6242 - protein, 13 aa, synthetic construct
SWEARALLHTLEH

SEQ ID NO: 6243 - protein, 13 aa, synthetic construct
HTTVRNALKDLLK

SEQ ID NO: 6244 - protein, 13 aa, synthetic construct
WDDQQKVKKTAEA

SEQ ID NO: 6245 - protein, 13 aa, synthetic construct
EKAYRQVNELLHN

SEQ ID NO: 6246 - protein, 13 aa, synthetic construct
EEDKVAVKAAVQN

SEQ ID NO: 6247 - protein, 13 aa, synthetic construct
HHTASESFMKHMQ

SEQ ID NO: 6248 - protein, 13 aa, synthetic construct
SAQVQKEEQLKID

SEQ ID NO: 6249 - protein, 13 aa, synthetic construct
LSDTVRVNRKMRD

SEQ ID NO: 6250 - protein, 13 aa, synthetic construct
LDDARALTTRAKA

SEQ ID NO: 6251 - protein, 13 aa, synthetic construct
AVQKESDEYILAK

SEQ ID NO: 6252 - protein, 13 aa, synthetic construct
AVERTRELFAKSL

SEQ ID NO: 6253 - protein, 13 aa, synthetic construct
DTRNRLLAQFADK

SEQ ID NO: 6254 - protein, 13 aa, synthetic construct
EFAKVIVQKLKDN

SEQ ID NO: 6255 - protein, 13 aa, synthetic construct
ERYVEQLKQALKT

SEQ ID NO: 6256 - protein, 13 aa, synthetic construct
LKDKLLHKQFASH

SEQ ID NO: 6257 - protein, 13 aa, synthetic construct
KKSYDEIAEKLND

SEQ ID NO: 6258 - protein, 13 aa, synthetic construct
DNEKNEFQLVLNK

SEQ ID NO: 6259 - protein, 13 aa, synthetic construct
QEAIQAAIKKVED

SEQ ID NO: 6260 - protein, 13 aa, synthetic construct
EKLTSQIYEETVK

SEQ ID NO: 6261 - protein, 13 aa, synthetic construct
HDVHTLVLGREIT

SEQ ID NO: 6262 - protein, 13 aa, synthetic construct
QDLRKKIVDLHKS

SEQ ID NO: 6263 - protein, 13 aa, synthetic construct
EHVRKVFDEIQQK

SEQ ID NO: 6264 - protein, 13 aa, synthetic construct
KEQLAELKVSYLK

SEQ ID NO: 6265 - protein, 13 aa, synthetic construct
NWPKTLKLALEKE

SEQ ID NO: 6266 - protein, 13 aa, synthetic construct
THGSRMDFIVKEL

SEQ ID NO: 6267 - protein, 13 aa, synthetic construct
LTEFTNEKDTLSK

SEQ ID NO: 6268 - protein, 13 aa, synthetic construct
LNYVKEKLEEVHS

SEQ ID NO: 6269 - protein, 13 aa, synthetic construct
VEGVWTLKDEIKT

SEQ ID NO: 6270 - protein, 13 aa, synthetic construct
NEDVARTKKIIQR

SEQ ID NO: 6271 - protein, 13 aa, synthetic construct
AETKKLLDIVARS

SEQ ID NO: 6272 - protein, 13 aa, synthetic construct
DYILKSLLESAEK

SEQ ID NO: 6273 - protein, 13 aa, synthetic construct
DRIGTHMINSAEK

SEQ ID NO: 6274 - protein, 13 aa, synthetic construct
SEDVVVSKVGRDL

SEQ ID NO: 6275 - protein, 13 aa, synthetic construct
HSETVAKHGAKLS

SEQ ID NO: 6276 - protein, 13 aa, synthetic construct
LDSTLEAVRKAKD

SEQ ID NO: 6277 - protein, 13 aa, synthetic construct
VESNLDVVRQKLE

SEQ ID NO: 6278 - protein, 13 aa, synthetic construct
ERNTEKVRDYLES

SEQ ID NO: 6279 - protein, 13 aa, synthetic construct
NDRLIATLKSMRD

SEQ ID NO: 6280 - protein, 13 aa, synthetic construct
KSTNRDYLAERLR

SEQ ID NO: 6281 - protein, 13 aa, synthetic construct
REEWKGGAETNKI

SEQ ID NO: 6282 - protein, 13 aa, synthetic construct
SAAIHRLVDTSEK

SEQ ID NO: 6283 - protein, 13 aa, synthetic construct
PKAGDEFVEKTLS

SEQ ID NO: 6284 - protein, 13 aa, synthetic construct
TPRKRLKESLDQI

SEQ ID NO: 6285 - protein, 13 aa, synthetic construct
EHSAKSLRLLLAE

SEQ ID NO: 6286 - protein, 13 aa, synthetic construct
QEFREAIRKALLT

SEQ ID NO: 6287 - protein, 13 aa, synthetic construct
TKDAEKVVSEIKA

SEQ ID NO: 6288 - protein, 13 aa, synthetic construct
LEGLKDITREVAS

SEQ ID NO: 6289 - protein, 13 aa, synthetic construct
VTDRIVRTLHDLS

SEQ ID NO: 6290 - protein, 13 aa, synthetic construct
DSKLVDKIANEIS

SEQ ID NO: 6291 - protein, 13 aa, synthetic construct
EGHLSLMRLARQH

SEQ ID NO: 6292 - protein, 13 aa, synthetic construct
QEYVRETIDKLMA

SEQ ID NO: 6293 - protein, 13 aa, synthetic construct
PTRKEEVVRALNN

SEQ ID NO: 6294 - protein, 13 aa, synthetic construct
SAIKDELIKTLDG

SEQ ID NO: 6295 - protein, 13 aa, synthetic construct
RDVDTTMELLKRL

SEQ ID NO: 6296 - protein, 13 aa, synthetic construct
VDTTRHVDVLHAW

SEQ ID NO: 6297 - protein, 13 aa, synthetic construct
EKLKETVVKAVSI

SEQ ID NO: 6298 - protein, 13 aa, synthetic construct
KSRLSHQITRMEN

SEQ ID NO: 6299 - protein, 13 aa, synthetic construct
SRLEDAVKKTVAE

SEQ ID NO: 6300 - protein, 13 aa, synthetic construct
SVDTLAKLAREKL

SEQ ID NO: 6301 - protein, 13 aa, synthetic construct
DADKTRYTALIIK

SEQ ID NO: 6302 - protein, 13 aa, synthetic construct
PEQVIAEAIRKKT

SEQ ID NO: 6303 - protein, 13 aa, synthetic construct
ETTLKRLGASHSK

SEQ ID NO: 6304 - protein, 13 aa, synthetic construct
DTSNRLKQIMAER

SEQ ID NO: 6305 - protein, 13 aa, synthetic construct
TSDVIKDLMERIK

SEQ ID NO: 6306 - protein, 13 aa, synthetic construct
PRQLKEIQDFVKE

SEQ ID NO: 6307 - protein, 13 aa, synthetic construct
EKAAQKVVSEVEA

SEQ ID NO: 6308 - protein, 13 aa, synthetic construct
TTGVHRLYQMEKD

SEQ ID NO: 6309 - protein, 13 aa, synthetic construct
DRTQTVLRDIRDA

SEQ ID NO: 6310 - protein, 13 aa, synthetic construct
DAQKEKYLPKLAT

SEQ ID NO: 6311 - protein, 13 aa, synthetic construct
QHGSRFIQQKLER

SEQ ID NO: 6312 - protein, 13 aa, synthetic construct
EADYIERTVSKVM

SEQ ID NO: 6313 - protein, 13 aa, synthetic construct
LDKMQQFVTKLHR

SEQ ID NO: 6314 - protein, 13 aa, synthetic construct
DLKTIKKTLQELL

SEQ ID NO: 6315 - protein, 13 aa, synthetic construct
RETVNKALADFAH

SEQ ID NO: 6316 - protein, 13 aa, synthetic construct
WDQLLDNVAKLKK

SEQ ID NO: 6317 - protein, 13 aa, synthetic construct
DVPEALNRTLKDL

SEQ ID NO: 6318 - protein, 13 aa, synthetic construct
EKVADRLKFQLGQ

SEQ ID NO: 6319 - protein, 13 aa, synthetic construct
STEVELSMKLREY

SEQ ID NO: 6320 - protein, 13 aa, synthetic construct
PDLHLNRATLHKY

SEQ ID NO: 6321 - protein, 13 aa, synthetic construct
SLEAKAIVDKTMD

SEQ ID NO: 6322 - protein, 13 aa, synthetic construct
EHGKSIVEHSKKI

SEQ ID NO: 6323 - protein, 13 aa, synthetic construct
AQDFRKSMELARE

SEQ ID NO: 6324 - protein, 13 aa, synthetic construct
EQDVNAAHDRLAR

SEQ ID NO: 6325 - protein, 13 aa, synthetic construct
TDQKVSEAKRAMQ

SEQ ID NO: 6326 - protein, 13 aa, synthetic construct
VSTVQRSVKKLHE

SEQ ID NO: 6327 - protein, 13 aa, synthetic construct
TEKTLKLVKQAEK

SEQ ID NO: 6328 - protein, 13 aa, synthetic construct
EKTVELLRNVLKE

SEQ ID NO: 6329 - protein, 13 aa, synthetic construct
IDEARQELHRIIN

SEQ ID NO: 6330 - protein, 13 aa, synthetic construct
RDAQAVQRQRVAD

SEQ ID NO: 6331 - protein, 13 aa, synthetic construct
TREKLNRILSERT

SEQ ID NO: 6332 - protein, 13 aa, synthetic construct
IFASRTLIDRLKE

SEQ ID NO: 6333 - protein, 13 aa, synthetic construct
ADAHSNLASIHKD

SEQ ID NO: 6334 - protein, 13 aa, synthetic construct
RQEYEDIAVKLGT

SEQ ID NO: 6335 - protein, 13 aa, synthetic construct
HHAWHRLLDQALN

SEQ ID NO: 6336 - protein, 13 aa, synthetic construct
KSYKELVTLSAEE

SEQ ID NO: 6337 - protein, 13 aa, synthetic construct
PSRDRLLAHLGTE

SEQ ID NO: 6338 - protein, 13 aa, synthetic construct
TEKAWEVLTKARA

SEQ ID NO: 6339 - protein, 13 aa, synthetic construct
EYRKKLMDGLTNQ

SEQ ID NO: 6340 - protein, 13 aa, synthetic construct
KDKLKNLIWIHEN

SEQ ID NO: 6341 - protein, 13 aa, synthetic construct
EQYREPLRNALKD

SEQ ID NO: 6342 - protein, 13 aa, synthetic construct
NEEKSYKIPRVNS

SEQ ID NO: 6343 - protein, 13 aa, synthetic construct
ESNLKRLGAIHFK

SEQ ID NO: 6344 - protein, 13 aa, synthetic construct
EQLARKAEAQAKK

SEQ ID NO: 6345 - protein, 13 aa, synthetic construct
MGHAEKIASELKT

SEQ ID NO: 6346 - protein, 13 aa, synthetic construct
QEDTFAAELHRLK

SEQ ID NO: 6347 - protein, 13 aa, synthetic construct
LETNLRKLFDKLL

SEQ ID NO: 6348 - protein, 13 aa, synthetic construct
IKETQEMVDFSIK

SEQ ID NO: 6349 - protein, 13 aa, synthetic construct
ESTLYPILKKLEK

SEQ ID NO: 6350 - protein, 13 aa, synthetic construct
LKEVETSLSRFEQ

SEQ ID NO: 6351 - protein, 13 aa, synthetic construct
EQVAKEAQKILTK

SEQ ID NO: 6352 - protein, 13 aa, synthetic construct
EKEGLEVLSAIRN

SEQ ID NO: 6353 - protein, 13 aa, synthetic construct
ERVKETLRTVKKD

SEQ ID NO: 6354 - protein, 13 aa, synthetic construct
ESGQKELQIRYEK

SEQ ID NO: 6355 - protein, 13 aa, synthetic construct
EKSLRTMDRLVRA

SEQ ID NO: 6356 - protein, 13 aa, synthetic construct
QKDRDIFVKKAES

SEQ ID NO: 6357 - protein, 13 aa, synthetic construct
AKELAELANRAES

SEQ ID NO: 6358 - protein, 13 aa, synthetic construct
TSTILREVELLKK

SEQ ID NO: 6359 - protein, 13 aa, synthetic construct
QDERDIAATVRQF

SEQ ID NO: 6360 - protein, 13 aa, synthetic construct
RTAHNAREKLAES

SEQ ID NO: 6361 - protein, 13 aa, synthetic construct
VKEAKQIVKDWKS

SEQ ID NO: 6362 - protein, 13 aa, synthetic construct
DTTKKIIDEALYH

SEQ ID NO: 6363 - protein, 13 aa, synthetic construct
TSEAVELAKHAEK

SEQ ID NO: 6364 - protein, 13 aa, synthetic construct
YEVKRARELNQLL

SEQ ID NO: 6365 - protein, 13 aa, synthetic construct
SEVKAYETKVAVE

SEQ ID NO: 6366 - protein, 13 aa, synthetic construct
VWALDSEVKSLHR

SEQ ID NO: 6367 - protein, 13 aa, synthetic construct
EENRKAFEKALET

SEQ ID NO: 6368 - protein, 13 aa, synthetic construct
DQIVNNKVKKGLE

SEQ ID NO: 6369 - protein, 13 aa, synthetic construct
DGLIAERQKLLDS

SEQ ID NO: 6370 - protein, 13 aa, synthetic construct
QTHAKRAYRELVL

SEQ ID NO: 6371 - protein, 13 aa, synthetic construct
PQEKLKTVKENWK

SEQ ID NO: 6372 - protein, 13 aa, synthetic construct
SEKFLNDLVDSMK

SEQ ID NO: 6373 - protein, 13 aa, synthetic construct
PANFEAQMKHLKD

SEQ ID NO: 6374 - protein, 13 aa, synthetic construct
HGESLRVHALAES

SEQ ID NO: 6375 - protein, 13 aa, synthetic construct
RETVTKVIGELAR

SEQ ID NO: 6376 - protein, 13 aa, synthetic construct
LADFRQTIDKVDA

SEQ ID NO: 6377 - protein, 13 aa, synthetic construct
KPEIRALNELADS

SEQ ID NO: 6378 - protein, 13 aa, synthetic construct
RADVKSVMDSLIR

SEQ ID NO: 6379 - protein, 13 aa, synthetic construct
QRRIKKVTHDMDM

SEQ ID NO: 6380 - protein, 13 aa, synthetic construct
RELVKKVSDVIWN

SEQ ID NO: 6381 - protein, 13 aa, synthetic construct
VQTLRERLIDALE

SEQ ID NO: 6382 - protein, 13 aa, synthetic construct
DVRTERLRDRITQ

SEQ ID NO: 6383 - protein, 13 aa, synthetic construct
LSTAQKIIKEARD

SEQ ID NO: 6384 - protein, 13 aa, synthetic construct
EVSSRVVHAIKEA

SEQ ID NO: 6385 - protein, 13 aa, synthetic construct
SRVSRFADLSKEV

SEQ ID NO: 6386 - protein, 13 aa, synthetic construct
EKVESEIKKVENF

SEQ ID NO: 6387 - protein, 13 aa, synthetic construct
EDRLNQIVQELRG

SEQ ID NO: 6388 - protein, 13 aa, synthetic construct
RIRDEVFKVLQQH

SEQ ID NO: 6389 - protein, 13 aa, synthetic construct
PATVDRTHALMRK

SEQ ID NO: 6390 - protein, 13 aa, synthetic construct
SKVIIDRVTEYLE

SEQ ID NO: 6391 - protein, 13 aa, synthetic construct
KSAKSLKPLFDEL

SEQ ID NO: 6392 - protein, 13 aa, synthetic construct
VDKRNETTLKLIK

SEQ ID NO: 6393 - protein, 13 aa, synthetic construct
KETLLADMRQAER

SEQ ID NO: 6394 - protein, 13 aa, synthetic construct
MDIQARIKFETEG

SEQ ID NO: 6395 - protein, 13 aa, synthetic construct
VKSYDEIIKKLSD

SEQ ID NO: 6396 - protein, 13 aa, synthetic construct
KDTVEKVRQTFEN

SEQ ID NO: 6397 - protein, 13 aa, synthetic construct
DEVSTKILMEFNK

SEQ ID NO: 6398 - protein, 13 aa, synthetic construct
FDTVADKIHSVSR

SEQ ID NO: 6399 - protein, 13 aa, synthetic construct
ENVLEAARHLHQT

SEQ ID NO: 6400 - protein, 13 aa, synthetic construct
RDKVNDIVDQVIT

SEQ ID NO: 6401 - protein, 13 aa, synthetic construct
RERVASLLKERLT

SEQ ID NO: 6402 - protein, 13 aa, synthetic construct
VDKRNETTLRLIK

SEQ ID NO: 6403 - protein, 13 aa, synthetic construct
ESLVEKVKEFLST

SEQ ID NO: 6404 - protein, 13 aa, synthetic construct
PDKVKEFAQRITA

SEQ ID NO: 6405 - protein, 13 aa, synthetic construct
GEANVKKEIQLLR

SEQ ID NO: 6406 - protein, 13 aa, synthetic construct
RMREQLNFLAEEL

SEQ ID NO: 6407 - protein, 13 aa, synthetic construct
EKTLRDKLVLATE

SEQ ID NO: 6408 - protein, 13 aa, synthetic construct
PDATAETKALLHR

SEQ ID NO: 6409 - protein, 13 aa, synthetic construct
ESAVTDFAARLRE

SEQ ID NO: 6410 - protein, 13 aa, synthetic construct
ITKHMERYLDILN

SEQ ID NO: 6411 - protein, 13 aa, synthetic construct
QEFREAIRKALVS

SEQ ID NO: 6412 - protein, 13 aa, synthetic construct
DNKLNEIGEKYKK

SEQ ID NO: 6413 - protein, 13 aa, synthetic construct
RVTVTRLLGDLRE

SEQ ID NO: 6414 - protein, 13 aa, synthetic construct
AQRLHEIRTQLVE

SEQ ID NO: 6415 - protein, 13 aa, synthetic construct
GLDRKEVQQLTVK

SEQ ID NO: 6416 - protein, 13 aa, synthetic construct
TIDKVSDIVKEKL

SEQ ID NO: 6417 - protein, 13 aa, synthetic construct
AVLKDRVSRNSAD

SEQ ID NO: 6418 - protein, 13 aa, synthetic construct
PKARQEVDHHWQA

SEQ ID NO: 6419 - protein, 13 aa, synthetic construct
KAHSIRLRALAQE

SEQ ID NO: 6420 - protein, 13 aa, synthetic construct
TAMLKDTTELLKK

SEQ ID NO: 6421 - protein, 13 aa, synthetic construct
KDMKKAVMAFQDQ

SEQ ID NO: 6422 - protein, 13 aa, synthetic construct
TSLIKLVKDKIRE

SEQ ID NO: 6423 - protein, 13 aa, synthetic construct
KDVQKTLQNDVDN

SEQ ID NO: 6424 - protein, 13 aa, synthetic construct
TVSLTKKIKEAVD

SEQ ID NO: 6425 - protein, 13 aa, synthetic construct
DSDINRGIAKALK

SEQ ID NO: 6426 - protein, 13 aa, synthetic construct
GEELSHLKKALTI

SEQ ID NO: 6427 - protein, 13 aa, synthetic construct
NEDFVRLSTEARK

SEQ ID NO: 6428 - protein, 13 aa, synthetic construct
DDIVEQQKPIAIK

SEQ ID NO: 6429 - protein, 13 aa, synthetic construct
EVITSAMAKKAHE

SEQ ID NO: 6430 - protein, 13 aa, synthetic construct
SDLVDQGKERLNR

SEQ ID NO: 6431 - protein, 13 aa, synthetic construct
SHREMTSKLLSDL

SEQ ID NO: 6432 - protein, 13 aa, synthetic construct
LAELKSYHQAHKA

SEQ ID NO: 6433 - protein, 13 aa, synthetic construct
KTKSVAEIIRDEF

SEQ ID NO: 6434 - protein, 13 aa, synthetic construct
SLTHAFKLLDKID

SEQ ID NO: 6435 - protein, 13 aa, synthetic construct
ASQVEKDSDLNQK

SEQ ID NO: 6436 - protein, 13 aa, synthetic construct
EAETRATVQKYKT

SEQ ID NO: 6437 - protein, 13 aa, synthetic construct
DTVYKKLVQREKT

SEQ ID NO: 6438 - protein, 13 aa, synthetic construct
KESLEALDAAKTA

SEQ ID NO: 6439 - protein, 13 aa, synthetic construct
RETVRQALRELLI

SEQ ID NO: 6440 - protein, 13 aa, synthetic construct
VQKDLERLTQERI

SEQ ID NO: 6441 - protein, 13 aa, synthetic construct
TTDVEKSFDKLLK

SEQ ID NO: 6442 - protein, 13 aa, synthetic construct
DRALTAAVKISER

SEQ ID NO: 6443 - protein, 13 aa, synthetic construct
VEFVKHELNRLLS

SEQ ID NO: 6444 - protein, 13 aa, synthetic construct
TAKDIAEAQKMLD

SEQ ID NO: 6445 - protein, 13 aa, synthetic construct
PEDVLKTAIKTVE

SEQ ID NO: 6446 - protein, 13 aa, synthetic construct
QEVEVAKSIAEKL

SEQ ID NO: 6447 - protein, 13 aa, synthetic construct
RETVSRVLHALAE

SEQ ID NO: 6448 - protein, 13 aa, synthetic construct
LKDISIIISHFDK

SEQ ID NO: 6449 - protein, 13 aa, synthetic construct
QATVQKIRDAIRD

SEQ ID NO: 6450 - protein, 13 aa, synthetic construct
AEKVDAINDVLRS

SEQ ID NO: 6451 - protein, 13 aa, synthetic construct
ADIRKEVEQIDKS

SEQ ID NO: 6452 - protein, 13 aa, synthetic construct
LKSHQVRLVLAEK

SEQ ID NO: 6453 - protein, 13 aa, synthetic construct
DADILSWANRKVR

SEQ ID NO: 6454 - protein, 13 aa, synthetic construct
QETIKHVKDLIAE

SEQ ID NO: 6455 - protein, 13 aa, synthetic construct
EKIQKEAQEALEK

SEQ ID NO: 6456 - protein, 13 aa, synthetic construct
EARVRNQFLKEMD

SEQ ID NO: 6457 - protein, 13 aa, synthetic construct
EKAILNVTKEWKK

SEQ ID NO: 6458 - protein, 13 aa, synthetic construct
HSQYREEALLNRL

SEQ ID NO: 6459 - protein, 13 aa, synthetic construct
IPDAERILKTLET

SEQ ID NO: 6460 - protein, 13 aa, synthetic construct
TEKSKELAEIVVQ

SEQ ID NO: 6461 - protein, 13 aa, synthetic construct
RKDRDTARQLHEV

SEQ ID NO: 6462 - protein, 13 aa, synthetic construct
VKEQEWSMAVERG

SEQ ID NO: 6463 - protein, 13 aa, synthetic construct
TRTRLSFEKAARE

SEQ ID NO: 6464 - protein, 13 aa, synthetic construct
RKSADKALEVYKS

SEQ ID NO: 6465 - protein, 13 aa, synthetic construct
FNTLKNNMKDIHD

SEQ ID NO: 6466 - protein, 13 aa, synthetic construct
DAHSIRLRALAQE

SEQ ID NO: 6467 - protein, 13 aa, synthetic construct
DATRERIKSAATR

SEQ ID NO: 6468 - protein, 13 aa, synthetic construct
SKAKDRVMDIART

SEQ ID NO: 6469 - protein, 13 aa, synthetic construct
SEMALKWITKGEK

SEQ ID NO: 6470 - protein, 13 aa, synthetic construct
ITRDSVIRIAKDL

SEQ ID NO: 6471 - protein, 13 aa, synthetic construct
ENEVGVAIQEKLR

SEQ ID NO: 6472 - protein, 13 aa, synthetic construct
DNVTKDVFADLNR

SEQ ID NO: 6473 - protein, 13 aa, synthetic construct
KTLKKIAEKVESE

SEQ ID NO: 6474 - protein, 13 aa, synthetic construct
MKETQEMIDFAAK

SEQ ID NO: 6475 - protein, 13 aa, synthetic construct
EAQKEKYLPKLIS

SEQ ID NO: 6476 - protein, 13 aa, synthetic construct
VQEGVDKIRHFQE

SEQ ID NO: 6477 - protein, 13 aa, synthetic construct
QMLEKNAREAVKE

SEQ ID NO: 6478 - protein, 13 aa, synthetic construct
RAEVVQQLEKELF

SEQ ID NO: 6479 - protein, 13 aa, synthetic construct
DKERSIISDIFSH

SEQ ID NO: 6480 - protein, 13 aa, synthetic construct
DRNDLITYLKKAT

SEQ ID NO: 6481 - protein, 13 aa, synthetic construct
DQQKKKYLGRMTE

SEQ ID NO: 6482 - protein, 13 aa, synthetic construct
AEADKAIQRYESL

SEQ ID NO: 6483 - protein, 13 aa, synthetic construct
KANREKMTQIMFE

SEQ ID NO: 6484 - protein, 13 aa, synthetic construct
RKITDDLVKNVEK

SEQ ID NO: 6485 - protein, 13 aa, synthetic construct
MIGEETKAQILDK

SEQ ID NO: 6486 - protein, 13 aa, synthetic construct
EQIAKEALKVLTK

SEQ ID NO: 6487 - protein, 13 aa, synthetic construct
EKLVKNLFQLARE

SEQ ID NO: 6488 - protein, 13 aa, synthetic construct
RQALGEAREVIKN

SEQ ID NO: 6489 - protein, 13 aa, synthetic construct
QVTKDAAEAIKKH

SEQ ID NO: 6490 - protein, 13 aa, synthetic construct
NEQVAEKVKVAID

SEQ ID NO: 6491 - protein, 13 aa, synthetic construct
YDKTTEVIIRDIR

SEQ ID NO: 6492 - protein, 13 aa, synthetic construct
SDEVRKNLMDMFR

SEQ ID NO: 6493 - protein, 13 aa, synthetic construct
VETGKKVVELSEK

SEQ ID NO: 6494 - protein, 13 aa, synthetic construct
RKNVEYLEKLRES

SEQ ID NO: 6495 - protein, 13 aa, synthetic construct
LLRETKVGVEVNK

SEQ ID NO: 6496 - protein, 13 aa, synthetic construct
PRTREVLKEWIAS

SEQ ID NO: 6497 - protein, 13 aa, synthetic construct
SKAVKEAYENAQK

SEQ ID NO: 6498 - protein, 13 aa, synthetic construct
MESKARLLSLVKD

SEQ ID NO: 6499 - protein, 13 aa, synthetic construct
EETRNAVWAAIKE

SEQ ID NO: 6500 - protein, 13 aa, synthetic construct
QHGSRFIQLKLER

SEQ ID NO: 6501 - protein, 13 aa, synthetic construct
DERMAQFTARLNE

SEQ ID NO: 6502 - protein, 13 aa, synthetic construct
EHVQRLLLSSREA

SEQ ID NO: 6503 - protein, 13 aa, synthetic construct
KNELVQKAKLAEQ

SEQ ID NO: 6504 - protein, 13 aa, synthetic construct
AADRDGLRAQWQR

SEQ ID NO: 6505 - protein, 13 aa, synthetic construct
DRIGFSMISDAEK

SEQ ID NO: 6506 - protein, 13 aa, synthetic construct
DEDVREKLQASLK

SEQ ID NO: 6507 - protein, 13 aa, synthetic construct
KENKKFLLDLMLN

SEQ ID NO: 6508 - protein, 13 aa, synthetic construct
VKELEAYTDAIQR

SEQ ID NO: 6509 - protein, 13 aa, synthetic construct
KAKIDPILEARQN

SEQ ID NO: 6510 - protein, 13 aa, synthetic construct
WESAEKVVKTLLK

SEQ ID NO: 6511 - protein, 13 aa, synthetic construct
IQEIDKAIKKAAQ

SEQ ID NO: 6512 - protein, 13 aa, synthetic construct
AETIKELARLFES

SEQ ID NO: 6513 - protein, 13 aa, synthetic construct
PTKFAEIVEENLK

SEQ ID NO: 6514 - protein, 13 aa, synthetic construct
TDIVEAVAERLQR

SEQ ID NO: 6515 - protein, 13 aa, synthetic construct
SKEIVTLVEDFHR

SEQ ID NO: 6516 - protein, 13 aa, synthetic construct
DSGRETVRAALKH

SEQ ID NO: 6517 - protein, 13 aa, synthetic construct
KADLREAIQTMLD

SEQ ID NO: 6518 - protein, 13 aa, synthetic construct
TLELTRQVKEKLA

SEQ ID NO: 6519 - protein, 13 aa, synthetic construct
KQYLELMQKVLDE

SEQ ID NO: 6520 - protein, 13 aa, synthetic construct
LDLTKILSKKYKE

SEQ ID NO: 6521 - protein, 13 aa, synthetic construct
VDQAKRIADELIS

SEQ ID NO: 6522 - protein, 13 aa, synthetic construct
AAQIKKLKEAIDS

SEQ ID NO: 6523 - protein, 13 aa, synthetic construct
EKEAKDSAITFIQ

SEQ ID NO: 6524 - protein, 13 aa, synthetic construct
DAQRQATKDAGRI

SEQ ID NO: 6525 - protein, 13 aa, synthetic construct
KQQFLKVLKEAES

SEQ ID NO: 6526 - protein, 13 aa, synthetic construct
TLKVLRHHQEKLE

SEQ ID NO: 6527 - protein, 13 aa, synthetic construct
TKIAEKIDEFLAT

SEQ ID NO: 6528 - protein, 13 aa, synthetic construct
EKLALDLLEQIKN

SEQ ID NO: 6529 - protein, 13 aa, synthetic construct
DIFNKNLRAHALE

SEQ ID NO: 6530 - protein, 13 aa, synthetic construct
IQEIVDKVKPQLE

SEQ ID NO: 6531 - protein, 13 aa, synthetic construct
MKQYLKTKLLEEV

SEQ ID NO: 6532 - protein, 13 aa, synthetic construct
LEELFSKIKNTLK

SEQ ID NO: 6533 - protein, 13 aa, synthetic construct
RDEVLAQLEKSLK

SEQ ID NO: 6534 - protein, 13 aa, synthetic construct
QETRKKTMVDLET

SEQ ID NO: 6535 - protein, 13 aa, synthetic construct
TWVRDVVRSMDRK

SEQ ID NO: 6536 - protein, 13 aa, synthetic construct
DIFNKNMRAHALE

SEQ ID NO: 6537 - protein, 13 aa, synthetic construct
LRKTADDFLNRIA

SEQ ID NO: 6538 - protein, 13 aa, synthetic construct
FDVKIAEQISKET

SEQ ID NO: 6539 - protein, 13 aa, synthetic construct
EALIRKASEISIK

SEQ ID NO: 6540 - protein, 13 aa, synthetic construct
DAKARDVVNRLTA

SEQ ID NO: 6541 - protein, 13 aa, synthetic construct
MDQVMKAHELYQK

SEQ ID NO: 6542 - protein, 13 aa, synthetic construct
PSGTFVREKIRES

SEQ ID NO: 6543 - protein, 13 aa, synthetic construct
LEKVREQVQAAHA

SEQ ID NO: 6544 - protein, 13 aa, synthetic construct
RPRVEQITAELLD

SEQ ID NO: 6545 - protein, 13 aa, synthetic construct
RDLASRIVSTQHH

SEQ ID NO: 6546 - protein, 13 aa, synthetic construct
TSLMERVTEYAEK

SEQ ID NO: 6547 - protein, 13 aa, synthetic construct
QENKKKTVVDFET

SEQ ID NO: 6548 - protein, 13 aa, synthetic construct
LKEISDLIKKELT

SEQ ID NO: 6549 - protein, 13 aa, synthetic construct
RKSLGELIHTLDG

SEQ ID NO: 6550 - protein, 13 aa, synthetic construct
TASVDKKYAELVD

SEQ ID NO: 6551 - protein, 13 aa, synthetic construct
AQELKQLIDTAKE

SEQ ID NO: 6552 - protein, 13 aa, synthetic construct
DDKLEQIRKDYTS

SEQ ID NO: 6553 - protein, 13 aa, synthetic construct
FKQLVEDLDRILT

SEQ ID NO: 6554 - protein, 13 aa, synthetic construct
PRQKEALAKFREN

SEQ ID NO: 6555 - protein, 13 aa, synthetic construct
AATLEEKLNKIFE

SEQ ID NO: 6556 - protein, 13 aa, synthetic construct
KKSLTEIKDVLAS

SEQ ID NO: 6557 - protein, 13 aa, synthetic construct
QKDLKDWVEALNQ

SEQ ID NO: 6558 - protein, 13 aa, synthetic construct
ETTRLWREVVTEV

SEQ ID NO: 6559 - protein, 13 aa, synthetic construct
KDATNEAIRDWIT

SEQ ID NO: 6560 - protein, 13 aa, synthetic construct
YDDIKAAMKTASE

SEQ ID NO: 6561 - protein, 13 aa, synthetic construct
EKVIKWAEQNAAE

SEQ ID NO: 6562 - protein, 13 aa, synthetic construct
KEEDQRVIKLVQK

SEQ ID NO: 6563 - protein, 13 aa, synthetic construct
EEQVDKINQRLKE

SEQ ID NO: 6564 - protein, 13 aa, synthetic construct
VDEALKDAQTRIT

SEQ ID NO: 6565 - protein, 13 aa, synthetic construct
NETRAYVLDRMKE

SEQ ID NO: 6566 - protein, 13 aa, synthetic construct
KEELVRLIQTAHA

SEQ ID NO: 6567 - protein, 13 aa, synthetic construct
EAEKTGAQELLRV

SEQ ID NO: 6568 - protein, 13 aa, synthetic construct
LEDLKLTTDLLLK

SEQ ID NO: 6569 - protein, 13 aa, synthetic construct
PEFQANEVRKVKK

SEQ ID NO: 6570 - protein, 13 aa, synthetic construct
RADLEATLRKITD

SEQ ID NO: 6571 - protein, 13 aa, synthetic construct
PRAIETAKENAKL

SEQ ID NO: 6572 - protein, 13 aa, synthetic construct
QEALSVARAFDEK

SEQ ID NO: 6573 - protein, 13 aa, synthetic construct
KDRNDLITYLKKA

SEQ ID NO: 6574 - protein, 13 aa, synthetic construct
RETLLTMAERARA

SEQ ID NO: 6575 - protein, 13 aa, synthetic construct
ETTRLALKALARH

SEQ ID NO: 6576 - protein, 13 aa, synthetic construct
IPSKYRDELTAKL

SEQ ID NO: 6577 - protein, 13 aa, synthetic construct
AKVSEALEKRYSM

SEQ ID NO: 6578 - protein, 13 aa, synthetic construct
ISDTVKRAREAFN

SEQ ID NO: 6579 - protein, 13 aa, synthetic construct
SDDRKKHLLIREQ

SEQ ID NO: 6580 - protein, 13 aa, synthetic construct
TSTISALERVKKE

SEQ ID NO: 6581 - protein, 13 aa, synthetic construct
THASIDLTKKATE

SEQ ID NO: 6582 - protein, 13 aa, synthetic construct
ETRINIVKLTEKI

SEQ ID NO: 6583 - protein, 13 aa, synthetic construct
KQRIVEEVTRLLK

SEQ ID NO: 6584 - protein, 13 aa, synthetic construct
SEDAKGLIKSAIR

SEQ ID NO: 6585 - protein, 13 aa, synthetic construct
VRDERNVIRAASN

SEQ ID NO: 6586 - protein, 13 aa, synthetic construct
PRDVETLLQGMRD

SEQ ID NO: 6587 - protein, 13 aa, synthetic construct
AKDRVDLQFGVEQ

SEQ ID NO: 6588 - protein, 13 aa, synthetic construct
TDGTGHIRAIKES

SEQ ID NO: 6589 - protein, 13 aa, synthetic construct
QESVKSKVQYLKD

SEQ ID NO: 6590 - protein, 13 aa, synthetic construct
EQLLRKAEAQAKK

SEQ ID NO: 6591 - protein, 13 aa, synthetic construct
VENVTELKKNFNR

SEQ ID NO: 6592 - protein, 13 aa, synthetic construct
MRQVEALVEASKE

SEQ ID NO: 6593 - protein, 13 aa, synthetic construct
RDHLENFVKSLEA

SEQ ID NO: 6594 - protein, 13 aa, synthetic construct
QKEIDRLNEVAKN

SEQ ID NO: 6595 - protein, 13 aa, synthetic construct
LDEIISRAKKAET

SEQ ID NO: 6596 - protein, 13 aa, synthetic construct
LEKLTQDVLDIAR

SEQ ID NO: 6597 - protein, 13 aa, synthetic construct
DKLISETAKSVMK

SEQ ID NO: 6598 - protein, 13 aa, synthetic construct
QRVEAMFHTLDKI

SEQ ID NO: 6599 - protein, 13 aa, synthetic construct
VTESIDAHLLAKK

SEQ ID NO: 6600 - protein, 13 aa, synthetic construct
EGLYDQIMRVKND

SEQ ID NO: 6601 - protein, 13 aa, synthetic construct
NREIREINRVYKE

SEQ ID NO: 6602 - protein, 13 aa, synthetic construct
LNVLERKLSEFDK

SEQ ID NO: 6603 - protein, 13 aa, synthetic construct
MRERIEFLNEASV

SEQ ID NO: 6604 - protein, 13 aa, synthetic construct
EQHLRKAEAQAKK

SEQ ID NO: 6605 - protein, 13 aa, synthetic construct
VEVKSIVDFIKSH

SEQ ID NO: 6606 - protein, 13 aa, synthetic construct
VEVKSIVDFVKNH

SEQ ID NO: 6607 - protein, 14 aa, synthetic construct
GTHSKEREVWKEAL

SEQ ID NO: 6608 - protein, 14 aa, synthetic construct
NGKNRVKQWDTLVD

SEQ ID NO: 6609 - protein, 14 aa, synthetic construct
EKLKIKAQSYLDAI

SEQ ID NO: 6610 - protein, 14 aa, synthetic construct
PEQVIAEAIRKKTR

SEQ ID NO: 6611 - protein, 14 aa, synthetic construct
RDKVNDIVDQVITI

SEQ ID NO: 6612 - protein, 14 aa, synthetic construct
EAEKTAAQELLKVL

SEQ ID NO: 6613 - protein, 14 aa, synthetic construct
RHVAEREIATLAGS

SEQ ID NO: 6614 - protein, 14 aa, synthetic construct
NQDELKKLAATEAA

SEQ ID NO: 6615 - protein, 14 aa, synthetic construct
LMDNARVVDQLMKD

SEQ ID NO: 6616 - protein, 14 aa, synthetic construct
THLQVMAKERFHAG

SEQ ID NO: 6617 - protein, 14 aa, synthetic construct
ELSNRIREHGRNIA

SEQ ID NO: 6618 - protein, 14 aa, synthetic construct
NVRELKNVIERAVL

SEQ ID NO: 6619 - protein, 14 aa, synthetic construct
PTRDVVQRALAELE

SEQ ID NO: 6620 - protein, 14 aa, synthetic construct
NERNEALLKRINGR

SEQ ID NO: 6621 - protein, 14 aa, synthetic construct
REELTAVMRFLTQR

SEQ ID NO: 6622 - protein, 14 aa, synthetic construct
QERAKELAENASFI

SEQ ID NO: 6623 - protein, 14 aa, synthetic construct
YRGKIEKAVDLTSS

SEQ ID NO: 6624 - protein, 14 aa, synthetic construct
RQHNFEVAKELLET

SEQ ID NO: 6625 - protein, 14 aa, synthetic construct
DPVNQHVISEGLKK

SEQ ID NO: 6626 - protein, 14 aa, synthetic construct
FRDLALRVDQIRDN

SEQ ID NO: 6627 - protein, 14 aa, synthetic construct
EKLLDKAQRIVTNS

SEQ ID NO: 6628 - protein, 14 aa, synthetic construct
HQAMRAAGDEFETR

SEQ ID NO: 6629 - protein, 14 aa, synthetic construct
RKTMLELVEKVAEQ

SEQ ID NO: 6630 - protein, 14 aa, synthetic construct
RLENDIIRLINRTV

SEQ ID NO: 6631 - protein, 14 aa, synthetic construct
LSDFKELLRTVKAT

SEQ ID NO: 6632 - protein, 14 aa, synthetic construct
EDEVKTLLELKTKY

SEQ ID NO: 6633 - protein, 14 aa, synthetic construct
AQITEAIDGVRERL

SEQ ID NO: 6634 - protein, 14 aa, synthetic construct
QNRFDSLITELGKE

SEQ ID NO: 6635 - protein, 14 aa, synthetic construct
PDKIEKILSTLVKG

SEQ ID NO: 6636 - protein, 14 aa, synthetic construct
PDIRERFTKSRDAT

SEQ ID NO: 6637 - protein, 14 aa, synthetic construct
LRDRIKSKVDEQFD

SEQ ID NO: 6638 - protein, 14 aa, synthetic construct
QRDRLRSYRLLAEA

SEQ ID NO: 6639 - protein, 14 aa, synthetic construct
LDEAIQLAKALEKN

SEQ ID NO: 6640 - protein, 14 aa, synthetic construct
EEYLTSLGRKHRAV

SEQ ID NO: 6641 - protein, 14 aa, synthetic construct
LKSTQTVIHKALEK

SEQ ID NO: 6642 - protein, 14 aa, synthetic construct
EKSFKALMHLVSNE

SEQ ID NO: 6643 - protein, 14 aa, synthetic construct
MKEVDEQMLNVQNK

SEQ ID NO: 6644 - protein, 14 aa, synthetic construct
TVEMLVKVISEHKN

SEQ ID NO: 6645 - protein, 14 aa, synthetic construct
ADEVVKVANWAKDN

SEQ ID NO: 6646 - protein, 14 aa, synthetic construct
GDTHKRIWDAVASA

SEQ ID NO: 6647 - protein, 14 aa, synthetic construct
NSELIRLSMVLKEK

SEQ ID NO: 6648 - protein, 14 aa, synthetic construct
PEDKVKAVTKLNQH

SEQ ID NO: 6649 - protein, 14 aa, synthetic construct
KEGKATVEALINKY

SEQ ID NO: 6650 - protein, 14 aa, synthetic construct
DDEKNVAIAKYSQL

SEQ ID NO: 6651 - protein, 14 aa, synthetic construct
PTTDALEKKLAVLE

SEQ ID NO: 6652 - protein, 14 aa, synthetic construct
REVLAEKVKNAVNN

SEQ ID NO: 6653 - protein, 14 aa, synthetic construct
QTVDRLHFIKRMQE

SEQ ID NO: 6654 - protein, 14 aa, synthetic construct
ERQVRIQLKDHIDR

SEQ ID NO: 6655 - protein, 14 aa, synthetic construct
KETIDKVSDIVKEK

SEQ ID NO: 6656 - protein, 14 aa, synthetic construct
VDDTSDVIDALRKR

SEQ ID NO: 6657 - protein, 14 aa, synthetic construct
AASIDAVFETLEKK

SEQ ID NO: 6658 - protein, 14 aa, synthetic construct
REQLTQLVEFAKKN

SEQ ID NO: 6659 - protein, 14 aa, synthetic construct
LSTAQKIIKEARDA

SEQ ID NO: 6660 - protein, 14 aa, synthetic construct
NEKTAELIKELKEK

SEQ ID NO: 6661 - protein, 14 aa, synthetic construct
KEVVKANIDKIKSL

SEQ ID NO: 6662 - protein, 14 aa, synthetic construct
DESRGKARAAGVES

SEQ ID NO: 6663 - protein, 14 aa, synthetic construct
AEVHSQFDALKARI

SEQ ID NO: 6664 - protein, 14 aa, synthetic construct
PGQREKLFSKLIDI

SEQ ID NO: 6665 - protein, 14 aa, synthetic construct
NKAAREMKERVGQT

SEQ ID NO: 6666 - protein, 14 aa, synthetic construct
PDQVKASIDHIFKE

SEQ ID NO: 6667 - protein, 14 aa, synthetic construct
EVITSAMAKKAHEL

SEQ ID NO: 6668 - protein, 14 aa, synthetic construct
KDKTKGDAIDLSNA

SEQ ID NO: 6669 - protein, 14 aa, synthetic construct
ADHLLKAHLQKLMS

SEQ ID NO: 6670 - protein, 14 aa, synthetic construct
SLQIMEKIIKKAGD

SEQ ID NO: 6671 - protein, 14 aa, synthetic construct
SKEILAEAKKLNDA

SEQ ID NO: 6672 - protein, 14 aa, synthetic construct
EKVESEIKKVENFL

SEQ ID NO: 6673 - protein, 14 aa, synthetic construct
ADRVLKEFKDLLNS

SEQ ID NO: 6674 - protein, 14 aa, synthetic construct
AEFLVKSKHRDLTA

SEQ ID NO: 6675 - protein, 14 aa, synthetic construct
KETSDLLRKIAADS

SEQ ID NO: 6676 - protein, 14 aa, synthetic construct
HRDDVAEVTKLLAT

SEQ ID NO: 6677 - protein, 14 aa, synthetic construct
PETGESAARHLERA

SEQ ID NO: 6678 - protein, 14 aa, synthetic construct
FDDALNIVRKIGEN

SEQ ID NO: 6679 - protein, 14 aa, synthetic construct
REKLEAAASRIASL

SEQ ID NO: 6680 - protein, 14 aa, synthetic construct
QEGLRKHFGKVAES

SEQ ID NO: 6681 - protein, 14 aa, synthetic construct
RKLIDDAVAWAKQQ

SEQ ID NO: 6682 - protein, 14 aa, synthetic construct
DADKENIIALSKAL

SEQ ID NO: 6683 - protein, 14 aa, synthetic construct
PRTLNAWVKLVEEK

SEQ ID NO: 6684 - protein, 14 aa, synthetic construct
IQRRIKKVTHDMDM

SEQ ID NO: 6685 - protein, 14 aa, synthetic construct
FDDALRLTQKLTEA

SEQ ID NO: 6686 - protein, 14 aa, synthetic construct
KDRGMTLAVSKAVE

SEQ ID NO: 6687 - protein, 14 aa, synthetic construct
LSDYIKLTKENMRK

SEQ ID NO: 6688 - protein, 14 aa, synthetic construct
DRLTRAAKVLEQLS

SEQ ID NO: 6689 - protein, 14 aa, synthetic construct
VSEVKAIIKKQVDE

SEQ ID NO: 6690 - protein, 14 aa, synthetic construct
MSAVVKKVADRLTE

SEQ ID NO: 6691 - protein, 14 aa, synthetic construct
AVNHIKSVWKDLLE

SEQ ID NO: 6692 - protein, 14 aa, synthetic construct
HHELTRVASALRKL

SEQ ID NO: 6693 - protein, 14 aa, synthetic construct
RNDIVQSLEKAVDM

SEQ ID NO: 6694 - protein, 14 aa, synthetic construct
AQADLLNLKRKVDA

SEQ ID NO: 6695 - protein, 14 aa, synthetic construct
LDRFQEAISAIREV

SEQ ID NO: 6696 - protein, 14 aa, synthetic construct
VNEIDKIVERTREL

SEQ ID NO: 6697 - protein, 14 aa, synthetic construct
RGFLKQLRELDKQL

SEQ ID NO: 6698 - protein, 14 aa, synthetic construct
RLERARQMGASLEA

SEQ ID NO: 6699 - protein, 14 aa, synthetic construct
LDLARKELKKMQDQ

SEQ ID NO: 6700 - protein, 14 aa, synthetic construct
LNQLKRIVDKASEL

SEQ ID NO: 6701 - protein, 14 aa, synthetic construct
EKIIKEFITKTLTD

SEQ ID NO: 6702 - protein, 14 aa, synthetic construct
LEVSRAAERVFKKQ

SEQ ID NO: 6703 - protein, 14 aa, synthetic construct
RTTEKKIMDKLVQE

SEQ ID NO: 6704 - protein, 14 aa, synthetic construct
DRAEMVETQKTFTL

SEQ ID NO: 6705 - protein, 14 aa, synthetic construct
EDLKQKVLDNWTKM

SEQ ID NO: 6706 - protein, 14 aa, synthetic construct
RHMVHELVSNLRKE

SEQ ID NO: 6707 - protein, 14 aa, synthetic construct
LATLERYVETQAKE

SEQ ID NO: 6708 - protein, 14 aa, synthetic construct
EDLIWKLLSKAQEK

SEQ ID NO: 6709 - protein, 14 aa, synthetic construct
QDYVKELHQQITRL

SEQ ID NO: 6710 - protein, 14 aa, synthetic construct
RDHETSHSLAREVY

SEQ ID NO: 6711 - protein, 14 aa, synthetic construct
KAEVLKDENSRLNA

SEQ ID NO: 6712 - protein, 14 aa, synthetic construct
EALIRKASEISIKA

SEQ ID NO: 6713 - protein, 14 aa, synthetic construct
ESLVDQRIKEALSR

SEQ ID NO: 6714 - protein, 14 aa, synthetic construct
PKLLHRVVEQLQKV

SEQ ID NO: 6715 - protein, 14 aa, synthetic construct
SENQVIAVDTQREK

SEQ ID NO: 6716 - protein, 14 aa, synthetic construct
RELARQIMDVVTEM

SEQ ID NO: 6717 - protein, 14 aa, synthetic construct
HAQAVDYIKKLMTK

SEQ ID NO: 6718 - protein, 14 aa, synthetic construct
STDKDTLAVFVDRV

SEQ ID NO: 6719 - protein, 14 aa, synthetic construct
ADESIDIVKAVKTR

SEQ ID NO: 6720 - protein, 14 aa, synthetic construct
DKSHDQAVRTYQEH

SEQ ID NO: 6721 - protein, 14 aa, synthetic construct
WVDKVKDLTKSEMN

SEQ ID NO: 6722 - protein, 14 aa, synthetic construct
KDEMKKILEDFLNT

SEQ ID NO: 6723 - protein, 14 aa, synthetic construct
TDTLERVTEIFKAL

SEQ ID NO: 6724 - protein, 14 aa, synthetic construct
VRDVRDESNKLIAK

SEQ ID NO: 6725 - protein, 14 aa, synthetic construct
REALRAEWQATAKE

SEQ ID NO: 6726 - protein, 14 aa, synthetic construct
IVEKILQYRELTKL

SEQ ID NO: 6727 - protein, 14 aa, synthetic construct
PREIKNAIEKSVTD

SEQ ID NO: 6728 - protein, 14 aa, synthetic construct
TNRVELLAKKITDL

SEQ ID NO: 6729 - protein, 14 aa, synthetic construct
PHELSRVAATLRKL

SEQ ID NO: 6730 - protein, 14 aa, synthetic construct
KGYKLIAEVITKTD

SEQ ID NO: 6731 - protein, 14 aa, synthetic construct
RETLEISYRNAIAR

SEQ ID NO: 6732 - protein, 14 aa, synthetic construct
EETRNAVWAAIKEL

SEQ ID NO: 6733 - protein, 14 aa, synthetic construct
DNGLKVEVRSILEK

SEQ ID NO: 6734 - protein, 14 aa, synthetic construct
FQLATKIMDKLIRD

SEQ ID NO: 6735 - protein, 14 aa, synthetic construct
LREGVLVSEVLKEN

SEQ ID NO: 6736 - protein, 14 aa, synthetic construct
MYNGDRARKQVLVD

SEQ ID NO: 6737 - protein, 14 aa, synthetic construct
LDQAESIYKAAAER

SEQ ID NO: 6738 - protein, 14 aa, synthetic construct
REEWKGQAETNKIL

SEQ ID NO: 6739 - protein, 14 aa, synthetic construct
LKSLQVRLELAREL

SEQ ID NO: 6740 - protein, 14 aa, synthetic construct
SEQVVHQLERLIAR

SEQ ID NO: 6741 - protein, 14 aa, synthetic construct
EAMWRETIARVRTE

SEQ ID NO: 6742 - protein, 14 aa, synthetic construct
KSTLAVELEHQLVR

SEQ ID NO: 6743 - protein, 14 aa, synthetic construct
NEPHQRLESLVKSK

SEQ ID NO: 6744 - protein, 14 aa, synthetic construct
AFTKSVDELREMAG

SEQ ID NO: 6745 - protein, 14 aa, synthetic construct
AERIRQLETEAGER

SEQ ID NO: 6746 - protein, 14 aa, synthetic construct
EDDAIASIHRIFKN

SEQ ID NO: 6747 - protein, 14 aa, synthetic construct
QLDTAVVRALRERF

SEQ ID NO: 6748 - protein, 14 aa, synthetic construct
KEAETRVRALLKET

SEQ ID NO: 6749 - protein, 14 aa, synthetic construct
RELASQIHRELIKI

SEQ ID NO: 6750 - protein, 14 aa, synthetic construct
GPEASAFKKKMVEN

SEQ ID NO: 6751 - protein, 14 aa, synthetic construct
REGLEKHFQAIIDS

SEQ ID NO: 6752 - protein, 14 aa, synthetic construct
NVRELKNLIERAVI

SEQ ID NO: 6753 - protein, 14 aa, synthetic construct
IEKVGKILTTAHWD

SEQ ID NO: 6754 - protein, 14 aa, synthetic construct
EKDVVQILKAVSEF

SEQ ID NO: 6755 - protein, 14 aa, synthetic construct
ADSVEPMFRHLKNT

SEQ ID NO: 6756 - protein, 14 aa, synthetic construct
KKTLNEGLGLLERV

SEQ ID NO: 6757 - protein, 14 aa, synthetic construct
EKTIQYVKEAMKKH

SEQ ID NO: 6758 - protein, 14 aa, synthetic construct
KGERQDLVAYLKSA

SEQ ID NO: 6759 - protein, 14 aa, synthetic construct
PQDVVRLANWAHEH

SEQ ID NO: 6760 - protein, 14 aa, synthetic construct
VSDLKKYIAELEVQ

SEQ ID NO: 6761 - protein, 14 aa, synthetic construct
QEVAKELAENARKI

SEQ ID NO: 6762 - protein, 14 aa, synthetic construct
EKNVAKIFKTAREL

SEQ ID NO: 6763 - protein, 14 aa, synthetic construct
TENEKFLGKLVRDK

SEQ ID NO: 6764 - protein, 14 aa, synthetic construct
VIGNETKKQYEALE

SEQ ID NO: 6765 - protein, 14 aa, synthetic construct
TLKALQELIADVRD

SEQ ID NO: 6766 - protein, 14 aa, synthetic construct
SKEVLVHVKNLEKN

SEQ ID NO: 6767 - protein, 14 aa, synthetic construct
DIFNKNMRAHALEK

SEQ ID NO: 6768 - protein, 14 aa, synthetic construct
PNMNAERLQRTADR

SEQ ID NO: 6769 - protein, 14 aa, synthetic construct
TDKFIDAAKQVVRA

SEQ ID NO: 6770 - protein, 14 aa, synthetic construct
TPQVFKEIDRLREN

SEQ ID NO: 6771 - protein, 14 aa, synthetic construct
TEKVVFEQTKVIAD

SEQ ID NO: 6772 - protein, 14 aa, synthetic construct
DAHRQNLVNWVDKV

SEQ ID NO: 6773 - protein, 14 aa, synthetic construct
DANFERVRMLADQL

SEQ ID NO: 6774 - protein, 14 aa, synthetic construct
GRDLTDYLMKILTE

SEQ ID NO: 6775 - protein, 14 aa, synthetic construct
KSTNRDYLAERLRE

SEQ ID NO: 6776 - protein, 14 aa, synthetic construct
PEVAKQWERLVRAT

SEQ ID NO: 6777 - protein, 14 aa, synthetic construct
KNAREDFLDNAASL

SEQ ID NO: 6778 - protein, 14 aa, synthetic construct
PTRDALESLLAKLD

SEQ ID NO: 6779 - protein, 14 aa, synthetic construct
VGDLIKAYDNQKKL

SEQ ID NO: 6780 - protein, 14 aa, synthetic construct
QEHRDLAREAARKS

SEQ ID NO: 6781 - protein, 14 aa, synthetic construct
NYRTITKAIIRHVE

SEQ ID NO: 6782 - protein, 14 aa, synthetic construct
TEQKKQVFKVAKEA

SEQ ID NO: 6783 - protein, 14 aa, synthetic construct
KTEVKEMLNLAAKH

SEQ ID NO: 6784 - protein, 14 aa, synthetic construct
EEVKKNVLTQLNRV

SEQ ID NO: 6785 - protein, 14 aa, synthetic construct
VEEFKSIIVDIQRS

SEQ ID NO: 6786 - protein, 14 aa, synthetic construct
AATLEEKLNKIFEK

SEQ ID NO: 6787 - protein, 14 aa, synthetic construct
ATQVLAEVEEAKKA

SEQ ID NO: 6788 - protein, 14 aa, synthetic construct
ENRLRETRLNLSRL

SEQ ID NO: 6789 - protein, 14 aa, synthetic construct
ENLGARVKELYLQK

SEQ ID NO: 6790 - protein, 14 aa, synthetic construct
KAKAHTITVEAHST

SEQ ID NO: 6791 - protein, 14 aa, synthetic construct
ESAYLDNLKKELAN

SEQ ID NO: 6792 - protein, 14 aa, synthetic construct
TEMAKKITKLVKDS

SEQ ID NO: 6793 - protein, 14 aa, synthetic construct
RSDLHATLVDAARA

SEQ ID NO: 6794 - protein, 14 aa, synthetic construct
DEIVSAQKPFVAKH

SEQ ID NO: 6795 - protein, 14 aa, synthetic construct
DDIVEQQKPIAIKH

SEQ ID NO: 6796 - protein, 14 aa, synthetic construct
TEEMRDLVQRETGK

SEQ ID NO: 6797 - protein, 14 aa, synthetic construct
AAAEKQRLASLLKD

SEQ ID NO: 6798 - protein, 14 aa, synthetic construct
KKQLEDVFVLLNEN

SEQ ID NO: 6799 - protein, 14 aa, synthetic construct
TEYVDALKKLQMLH

SEQ ID NO: 6800 - protein, 14 aa, synthetic construct
KSSVAMLVERKLLE

SEQ ID NO: 6801 - protein, 14 aa, synthetic construct
AKVSEALEKRYSMT

SEQ ID NO: 6802 - protein, 14 aa, synthetic construct
GEKLYTGLREVVTE

SEQ ID NO: 6803 - protein, 14 aa, synthetic construct
GESLKNLIDFHINH

SEQ ID NO: 6804 - protein, 14 aa, synthetic construct
QLELRDAVEHARTT

SEQ ID NO: 6805 - protein, 14 aa, synthetic construct
AAITHTARMADKLR

SEQ ID NO: 6806 - protein, 14 aa, synthetic construct
ENARKYVERVSELT

SEQ ID NO: 6807 - protein, 14 aa, synthetic construct
LTEVQTIVEQVKEK

SEQ ID NO: 6808 - protein, 14 aa, synthetic construct
EMRKGIDLATTLER

SEQ ID NO: 6809 - protein, 14 aa, synthetic construct
LTRAAVELAKEWRT

SEQ ID NO: 6810 - protein, 14 aa, synthetic construct
RQTEDQLKKLKGYT

SEQ ID NO: 6811 - protein, 14 aa, synthetic construct
DQQRDFQREIQILK

SEQ ID NO: 6812 - protein, 14 aa, synthetic construct
ADKLLTLEVKSLDT

SEQ ID NO: 6813 - protein, 14 aa, synthetic construct
LEAARQFSEAVKAE

SEQ ID NO: 6814 - protein, 14 aa, synthetic construct
SRVADYRDNMAKQT

SEQ ID NO: 6815 - protein, 14 aa, synthetic construct
DHTKKAVLEAKEKT

SEQ ID NO: 6816 - protein, 14 aa, synthetic construct
ERGKKQAKLLAQEL

SEQ ID NO: 6817 - protein, 14 aa, synthetic construct
TEELVQKIKAIKEV

SEQ ID NO: 6818 - protein, 14 aa, synthetic construct
LLKSAVELAKDWRT

SEQ ID NO: 6819 - protein, 14 aa, synthetic construct
PERTEVLGRAAEAT

SEQ ID NO: 6820 - protein, 14 aa, synthetic construct
LTNHQKFAKANVRE

SEQ ID NO: 6821 - protein, 14 aa, synthetic construct
QVRTEELLTGRALE

SEQ ID NO: 6822 - protein, 14 aa, synthetic construct
LENVLEAARHLHQT

SEQ ID NO: 6823 - protein, 14 aa, synthetic construct
PRDVAVSSFHHARL

SEQ ID NO: 6824 - protein, 14 aa, synthetic construct
DETLFKTLVKAKEL

SEQ ID NO: 6825 - protein, 14 aa, synthetic construct
PKVIHQALEDKIAQ

SEQ ID NO: 6826 - protein, 14 aa, synthetic construct
REQAEQVLRVALKH

SEQ ID NO: 6827 - protein, 14 aa, synthetic construct
DGEMYQTLRLAKEL

SEQ ID NO: 6828 - protein, 14 aa, synthetic construct
DHGKTTLSKVLTEI

SEQ ID NO: 6829 - protein, 14 aa, synthetic construct
RAEVAMMLNDRNRE

SEQ ID NO: 6830 - protein, 14 aa, synthetic construct
PDEAARQALEKQRE

SEQ ID NO: 6831 - protein, 14 aa, synthetic construct
DTLQARAMLDIVKR

SEQ ID NO: 6832 - protein, 14 aa, synthetic construct
QVRLERILDEISKE

SEQ ID NO: 6833 - protein, 14 aa, synthetic construct
LATKLFDNLERVKE

SEQ ID NO: 6834 - protein, 14 aa, synthetic construct
PRTLNAWVKVVEEK

SEQ ID NO: 6835 - protein, 14 aa, synthetic construct
SAAERELIGRFQDR

SEQ ID NO: 6836 - protein, 14 aa, synthetic construct
KALDKVEKVLVSAQ

SEQ ID NO: 6837 - protein, 14 aa, synthetic construct
RKQLHQLVDFAKTN

SEQ ID NO: 6838 - protein, 14 aa, synthetic construct
LEEAVNAEARKIAN

SEQ ID NO: 6839 - protein, 14 aa, synthetic construct
AESVEQAIAAREHR

SEQ ID NO: 6840 - protein, 14 aa, synthetic construct
DEQRKLLKEAQAEH

SEQ ID NO: 6841 - protein, 14 aa, synthetic construct
FKEISDDVKEKNKN

SEQ ID NO: 6842 - protein, 14 aa, synthetic construct
VEKVLKTRYHDATS

SEQ ID NO: 6843 - protein, 14 aa, synthetic construct
RETLLTMAERARAA

SEQ ID NO: 6844 - protein, 14 aa, synthetic construct
ADKVYKTLQRLRDL

SEQ ID NO: 6845 - protein, 14 aa, synthetic construct
PDDQQKEVVNMAQK

SEQ ID NO: 6846 - protein, 14 aa, synthetic construct
VERIFSIVEQRLEA

SEQ ID NO: 6847 - protein, 14 aa, synthetic construct
FDDVTDLLRKTLVS

SEQ ID NO: 6848 - protein, 14 aa, synthetic construct
EREASDIINNLRNF

SEQ ID NO: 6849 - protein, 14 aa, synthetic construct
WDTLEAVVKEKLAS

SEQ ID NO: 6850 - protein, 14 aa, synthetic construct
ADAHSNLASIHKDS

SEQ ID NO: 6851 - protein, 14 aa, synthetic construct
EASVRLAERLAKQA

SEQ ID NO: 6852 - protein, 14 aa, synthetic construct
AAIKAKDDFQMEIT

SEQ ID NO: 6853 - protein, 14 aa, synthetic construct
KEAATAVAKAFEQE

SEQ ID NO: 6854 - protein, 14 aa, synthetic construct
YKKRLNELITDALI

SEQ ID NO: 6855 - protein, 14 aa, synthetic construct
GEVAQIIRKVGTRE

SEQ ID NO: 6856 - protein, 14 aa, synthetic construct
EVEKNLVREAVKKS

SEQ ID NO: 6857 - protein, 14 aa, synthetic construct
KLERERMQNEYAKS

SEQ ID NO: 6858 - protein, 14 aa, synthetic construct
ESDLKRIGAIHFKT

SEQ ID NO: 6859 - protein, 14 aa, synthetic construct
DNQIGEVVKGFEKK

SEQ ID NO: 6860 - protein, 14 aa, synthetic construct
YNDEKKLASNEIAN

SEQ ID NO: 6861 - protein, 14 aa, synthetic construct
ITKHMERYLDILNS

SEQ ID NO: 6862 - protein, 14 aa, synthetic construct
FNRDIQLLKALDNE

SEQ ID NO: 6863 - protein, 14 aa, synthetic construct
ILEAQKIKKLADSA

SEQ ID NO: 6864 - protein, 14 aa, synthetic construct
KETQQRQIDLFTKV

SEQ ID NO: 6865 - protein, 14 aa, synthetic construct
DASEVTIRKAIARF

SEQ ID NO: 6866 - protein, 14 aa, synthetic construct
VQEAQGKWPALKEK

SEQ ID NO: 6867 - protein, 14 aa, synthetic construct
LGKTLDDQERKIAN

SEQ ID NO: 6868 - protein, 14 aa, synthetic construct
LTKAAVELAKDWRT

SEQ ID NO: 6869 - protein, 14 aa, synthetic construct
DYRGGQLAAKHLQE

SEQ ID NO: 6870 - protein, 14 aa, synthetic construct
VEGIFNDVVENVKR

SEQ ID NO: 6871 - protein, 14 aa, synthetic construct
PEDKSRIVSELKDK

SEQ ID NO: 6872 - protein, 14 aa, synthetic construct
EVTVRNRYKELVEK

SEQ ID NO: 6873 - protein, 14 aa, synthetic construct
KIVQERLEKVIASA

SEQ ID NO: 6874 - protein, 14 aa, synthetic construct
HEAFQNRVNELAAK

SEQ ID NO: 6875 - protein, 14 aa, synthetic construct
AEHRTLAREAVRKS

SEQ ID NO: 6876 - protein, 14 aa, synthetic construct
PPDHTRLRGLVSKA

SEQ ID NO: 6877 - protein, 14 aa, synthetic construct
TRELFEGAVRQIRL

SEQ ID NO: 6878 - protein, 14 aa, synthetic construct
EKTVEAFAEAVKTV

SEQ ID NO: 6879 - protein, 14 aa, synthetic construct
SDLVDQGKERLNRL

SEQ ID NO: 6880 - protein, 14 aa, synthetic construct
TDVDAANLRETFRN

SEQ ID NO: 6881 - protein, 14 aa, synthetic construct
MRERIEFLNEASVM

SEQ ID NO: 6882 - protein, 14 aa, synthetic construct
EKDRNDLITYLKKA

SEQ ID NO: 6883 - protein, 14 aa, synthetic construct
KSTVLAKVKEILDN

SEQ ID NO: 6884 - protein, 14 aa, synthetic construct
LTPRKRLKESLDQI

SEQ ID NO: 6885 - protein, 14 aa, synthetic construct
EETTAKLIYSKVRT

SEQ ID NO: 6886 - protein, 14 aa, synthetic construct
DRVRESLFNIVTAR

SEQ ID NO: 6887 - protein, 14 aa, synthetic construct
DVTLLKTLDKAVKT

SEQ ID NO: 6888 - protein, 14 aa, synthetic construct
EKTVELLRNVLKES

SEQ ID NO: 6889 - protein, 14 aa, synthetic construct
GSKEIDTVIELKKH

SEQ ID NO: 6890 - protein, 14 aa, synthetic construct
RAVNNEYVKVMREK

SEQ ID NO: 6891 - protein, 14 aa, synthetic construct
EITSKKIARERIDA

SEQ ID NO: 6892 - protein, 14 aa, synthetic construct
EDISKKIAQERMDA

SEQ ID NO: 6893 - protein, 14 aa, synthetic construct
WGVTKAAEKQMKDK

SEQ ID NO: 6894 - protein, 14 aa, synthetic construct
SDLVYETINRVKRI

SEQ ID NO: 6895 - protein, 14 aa, synthetic construct
PKEIQIQIRKFVGE

SEQ ID NO: 6896 - protein, 14 aa, synthetic construct
EKDRNDSITYLKKA

SEQ ID NO: 6897 - protein, 14 aa, synthetic construct
TSVKVKEAVEAVRD

SEQ ID NO: 6898 - protein, 14 aa, synthetic construct
TSAVYNELDRLREV

SEQ ID NO: 6899 - protein, 14 aa, synthetic construct
DKVALNWLKGLKEN

SEQ ID NO: 6900 - protein, 14 aa, synthetic construct
NRMIDSVLESARDM

SEQ ID NO: 6901 - protein, 14 aa, synthetic construct
LSVMKETYETVMKK

SEQ ID NO: 6902 - protein, 14 aa, synthetic construct
LYQRIAKIVSIDDD

SEQ ID NO: 6903 - protein, 14 aa, synthetic construct
EETQRTFLKEVKVM

SEQ ID NO: 6904 - protein, 14 aa, synthetic construct
PETAETLYKEIRKV

SEQ ID NO: 6905 - protein, 14 aa, synthetic construct
LDAVRTLKTVIDEK

SEQ ID NO: 6906 - protein, 14 aa, synthetic construct
RTAVKKVIDQLKLE

SEQ ID NO: 6907 - protein, 14 aa, synthetic construct
PARVVQLFRDVEQK

SEQ ID NO: 6908 - protein, 14 aa, synthetic construct
HSETVAKHGAKLSA

SEQ ID NO: 6909 - protein, 14 aa, synthetic construct
SAHLDRLQKAADKI

SEQ ID NO: 6910 - protein, 14 aa, synthetic construct
GKTLDTAKAVADEL

SEQ ID NO: 6911 - protein, 14 aa, synthetic construct
ESMNKELKKIIGQV

SEQ ID NO: 6912 - protein, 14 aa, synthetic construct
HDKAIEAYEKTISI

SEQ ID NO: 6913 - protein, 14 aa, synthetic construct
LDTVREEVKTLKER

SEQ ID NO: 6914 - protein, 14 aa, synthetic construct
NNRMELKAAIEGLK

SEQ ID NO: 6915 - protein, 14 aa, synthetic construct
KNVAAAERQLRELE

SEQ ID NO: 6916 - protein, 14 aa, synthetic construct
LTETVGELVRVAER

SEQ ID NO: 6917 - protein, 14 aa, synthetic construct
DMWVTIDKRMAEIT

SEQ ID NO: 6918 - protein, 14 aa, synthetic construct
PLKTAHDVRVTFAR

SEQ ID NO: 6919 - protein, 14 aa, synthetic construct
PHDTLNRIKKYLLT

SEQ ID NO: 6920 - protein, 14 aa, synthetic construct
ENTAIHHYLEALKV

SEQ ID NO: 6921 - protein, 14 aa, synthetic construct
IGDTAKKLGEMWSE

SEQ ID NO: 6922 - protein, 14 aa, synthetic construct
SLDKAKALKEQLEK

SEQ ID NO: 6923 - protein, 14 aa, synthetic construct
ARQDFQREAELLTM

SEQ ID NO: 6924 - protein, 14 aa, synthetic construct
FRDLALRVDQIRDQ

SEQ ID NO: 6925 - protein, 14 aa, synthetic construct
HDIKEDFSNLIRTL

SEQ ID NO: 6926 - protein, 14 aa, synthetic construct
ERTRKTGEAFAAGL

SEQ ID NO: 6927 - protein, 14 aa, synthetic construct
PHQLRHSFATHMLE

SEQ ID NO: 6928 - protein, 14 aa, synthetic construct
KTLAGQLHSELKEF

SEQ ID NO: 6929 - protein, 14 aa, synthetic construct
LYDALEKARDLLNN

SEQ ID NO: 6930 - protein, 14 aa, synthetic construct
WRAAMRKADTALSE

SEQ ID NO: 6931 - protein, 14 aa, synthetic construct
DETLFKTLIRAKEL

SEQ ID NO: 6932 - protein, 14 aa, synthetic construct
VQEGVDKIRHFQEL

SEQ ID NO: 6933 - protein, 14 aa, synthetic construct
REAHETLAIAMNRL

SEQ ID NO: 6934 - protein, 14 aa, synthetic construct
TDQLVRFIDEAHRA

SEQ ID NO: 6935 - protein, 14 aa, synthetic construct
DQERQVFQKALGKL

SEQ ID NO: 6936 - protein, 14 aa, synthetic construct
KTHLLQAAGNEAKK

SEQ ID NO: 6937 - protein, 14 aa, synthetic construct
HEFLSKVSHRIVNE

SEQ ID NO: 6938 - protein, 14 aa, synthetic construct
DTMKQAFDRMTKLR

SEQ ID NO: 6939 - protein, 14 aa, synthetic construct
LEELFSKIKNTLKV

SEQ ID NO: 6940 - protein, 14 aa, synthetic construct
DIVRERAIKFLSTK

SEQ ID NO: 6941 - protein, 14 aa, synthetic construct
VTKIKEVQRIAVEE

SEQ ID NO: 6942 - protein, 14 aa, synthetic construct
RASLKKLIDYHVAS

SEQ ID NO: 6943 - protein, 14 aa, synthetic construct
PAEFVDIKHRLTQI

SEQ ID NO: 6944 - protein, 14 aa, synthetic construct
LRDIVRANERGIQA

SEQ ID NO: 6945 - protein, 14 aa, synthetic construct
LGPHEANLFDMRQK

SEQ ID NO: 6946 - protein, 14 aa, synthetic construct
PIKHVSLMDQRARQ

SEQ ID NO: 6947 - protein, 14 aa, synthetic construct
DLLKHTTNVVKAHT

SEQ ID NO: 6948 - protein, 14 aa, synthetic construct
NETREKLHQLEKSL

SEQ ID NO: 6949 - protein, 14 aa, synthetic construct
DKVREKITLVEEKT

SEQ ID NO: 6950 - protein, 14 aa, synthetic construct
SEVREQINAKVAEW

SEQ ID NO: 6951 - protein, 14 aa, synthetic construct
RKITDDLVKNVEKL

SEQ ID NO: 6952 - protein, 14 aa, synthetic construct
NQLDSQRLKERLYN

SEQ ID NO: 6953 - protein, 14 aa, synthetic construct
KKELEVLSQKLRAL

SEQ ID NO: 6954 - protein, 14 aa, synthetic construct
TALADTGAKLHDKY

SEQ ID NO: 6955 - protein, 14 aa, synthetic construct
EVIDKIQKKTREFL

SEQ ID NO: 6956 - protein, 14 aa, synthetic construct
PQEKDISSKLLKAL

SEQ ID NO: 6957 - protein, 14 aa, synthetic construct
PYSSRLKKIGELLD

SEQ ID NO: 6958 - protein, 14 aa, synthetic construct
PYSSRLKKVGELLD

SEQ ID NO: 6959 - protein, 14 aa, synthetic construct
RAKVLGARNLHELT

SEQ ID NO: 6960 - protein, 14 aa, synthetic construct
KELHTELEQAGRFV

SEQ ID NO: 6961 - protein, 14 aa, synthetic construct
ESVRDALVRAQDYI

SEQ ID NO: 6962 - protein, 14 aa, synthetic construct
DQLRAGYVARASER

SEQ ID NO: 6963 - protein, 14 aa, synthetic construct
SEGLKSVVDHIKAN

SEQ ID NO: 6964 - protein, 14 aa, synthetic construct
PREVIEAIKNLAKT

SEQ ID NO: 6965 - protein, 14 aa, synthetic construct
LKDAINEAMRDWVT

SEQ ID NO: 6966 - protein, 14 aa, synthetic construct
YALRKHLVELAKTN

SEQ ID NO: 6967 - protein, 14 aa, synthetic construct
WERLLEKRQIGADT

SEQ ID NO: 6968 - protein, 14 aa, synthetic construct
QNGLEQAKKFHEAV

SEQ ID NO: 6969 - protein, 14 aa, synthetic construct
LDESVGKIWQKLVD

SEQ ID NO: 6970 - protein, 14 aa, synthetic construct
LEKTHELKEVLNKV

SEQ ID NO: 6971 - protein, 14 aa, synthetic construct
NRGLEIAKIAEKVS

SEQ ID NO: 6972 - protein, 14 aa, synthetic construct
EQLENEIIKAGKAS

SEQ ID NO: 6973 - protein, 14 aa, synthetic construct
RESQLNDAIKILNE

SEQ ID NO: 6974 - protein, 14 aa, synthetic construct
SDQRDAIVKGLKAK

SEQ ID NO: 6975 - protein, 14 aa, synthetic construct
ATQVLKELEEAKKA

SEQ ID NO: 6976 - protein, 14 aa, synthetic construct
DSVTARLREVEHRA

SEQ ID NO: 6977 - protein, 14 aa, synthetic construct
PGERDALLANEATK

SEQ ID NO: 6978 - protein, 14 aa, synthetic construct
NSKAKENAETTLLR

SEQ ID NO: 6979 - protein, 14 aa, synthetic construct
ITETAKKWVPEMRE

SEQ ID NO: 6980 - protein, 14 aa, synthetic construct
FENLIPILKTVHEK

SEQ ID NO: 6981 - protein, 14 aa, synthetic construct
NKEAKAWAKGVLEN

SEQ ID NO: 6982 - protein, 14 aa, synthetic construct
DVSKTIKEAIETTI

SEQ ID NO: 6983 - protein, 14 aa, synthetic construct
SMELLKQAYDKVRE

SEQ ID NO: 6984 - protein, 14 aa, synthetic construct
KQEFDTHMANGKDT

SEQ ID NO: 6985 - protein, 14 aa, synthetic construct
RSKGKEVMESFIKA

SEQ ID NO: 6986 - protein, 14 aa, synthetic construct
QEKAKTLLDKALTQ

SEQ ID NO: 6987 - protein, 14 aa, synthetic construct
THLADVLVSKQFHE

SEQ ID NO: 6988 - protein, 14 aa, synthetic construct
VDKIREFLQKISKE

SEQ ID NO: 6989 - protein, 14 aa, synthetic construct
RARIHALLDQVAES

SEQ ID NO: 6990 - protein, 14 aa, synthetic construct
PDVTRDILVNLDKV

SEQ ID NO: 6991 - protein, 14 aa, synthetic construct
IDTVLYMKEKATKA

SEQ ID NO: 6992 - protein, 14 aa, synthetic construct
ELFRKEATKLIGQI

SEQ ID NO: 6993 - protein, 14 aa, synthetic construct
FIKINDLAEQIEKI

SEQ ID NO: 6994 - protein, 14 aa, synthetic construct
KDRIGFSMISDAEK

SEQ ID NO: 6995 - protein, 14 aa, synthetic construct
LEKAKETILSILKK

SEQ ID NO: 6996 - protein, 14 aa, synthetic construct
EKVRESLRLTFHDA

SEQ ID NO: 6997 - protein, 14 aa, synthetic construct
QQRDFQREIQILKA

SEQ ID NO: 6998 - protein, 14 aa, synthetic construct
PHELTRVASALRKL

SEQ ID NO: 6999 - protein, 14 aa, synthetic construct
TEHLDAVFQRMKTE

SEQ ID NO: 7000 - protein, 14 aa, synthetic construct
EKIQKEAQEALEKL

SEQ ID NO: 7001 - protein, 14 aa, synthetic construct
PENTRLFEMVKRKE

SEQ ID NO: 7002 - protein, 14 aa, synthetic construct
QTHAKRAYRELVLM

SEQ ID NO: 7003 - protein, 14 aa, synthetic construct
MANMRAVRELTEAH

SEQ ID NO: 7004 - protein, 14 aa, synthetic construct
DTKLAEYTDLMLKL

SEQ ID NO: 7005 - protein, 14 aa, synthetic construct
QHERYVEQLKQALK

SEQ ID NO: 7006 - protein, 14 aa, synthetic construct
SEKGIADIRALLQK

SEQ ID NO: 7007 - protein, 14 aa, synthetic construct
HEVSLLSAEGVLRH

SEQ ID NO: 7008 - protein, 14 aa, synthetic construct
LEEAKENLYKAASL

SEQ ID NO: 7009 - protein, 14 aa, synthetic construct
ESKVEALDELVTKK

SEQ ID NO: 7010 - protein, 14 aa, synthetic construct
VRHQRAVENRLREA

SEQ ID NO: 7011 - protein, 14 aa, synthetic construct
AEELSKAVVETVRA

SEQ ID NO: 7012 - protein, 14 aa, synthetic construct
PIRDKEAIRVLSDT

SEQ ID NO: 7013 - protein, 14 aa, synthetic construct
KESIDRIIQVAKET

SEQ ID NO: 7014 - protein, 14 aa, synthetic construct
EKVKGIEELITNYS

SEQ ID NO: 7015 - protein, 14 aa, synthetic construct
AEQKKELSDIALRI

SEQ ID NO: 7016 - protein, 14 aa, synthetic construct
TEHHERAERVFNLL

SEQ ID NO: 7017 - protein, 14 aa, synthetic construct
DANVKRVADLIKES

SEQ ID NO: 7018 - protein, 14 aa, synthetic construct
VESAVTRVKAMMDE

SEQ ID NO: 7019 - protein, 14 aa, synthetic construct
LERQVYELEKLQEK

SEQ ID NO: 7020 - protein, 14 aa, synthetic construct
EENRKAVSDQLKKH

SEQ ID NO: 7021 - protein, 14 aa, synthetic construct
GKNAELISEKILKE

SEQ ID NO: 7022 - protein, 14 aa, synthetic construct
EQLLRKAEAQAKKE

SEQ ID NO: 7023 - protein, 14 aa, synthetic construct
KDNADTLAARAKNA

SEQ ID NO: 7024 - protein, 14 aa, synthetic construct
RTERDKLMQTVAHV

SEQ ID NO: 7025 - protein, 14 aa, synthetic construct
SHDRLRVHQIAEEH

SEQ ID NO: 7026 - protein, 14 aa, synthetic construct
SLVVSELSLKLRKE

SEQ ID NO: 7027 - protein, 14 aa, synthetic construct
IDEGVKIVLEITKS

SEQ ID NO: 7028 - protein, 14 aa, synthetic construct
PRTVEVHRANVMAK

SEQ ID NO: 7029 - protein, 14 aa, synthetic construct
KEVLKESAKTIVDS

SEQ ID NO: 7030 - protein, 14 aa, synthetic construct
NGQLWKKVKDSLID

SEQ ID NO: 7031 - protein, 14 aa, synthetic construct
DVERAIETLIKNFH

SEQ ID NO: 7032 - protein, 14 aa, synthetic construct
EFQDSLKKVEKASL

SEQ ID NO: 7033 - protein, 14 aa, synthetic construct
VDKTFHDLVRVIRQ

SEQ ID NO: 7034 - protein, 14 aa, synthetic construct
ATAQMEEKLRDFTR

SEQ ID NO: 7035 - protein, 14 aa, synthetic construct
PEQKKELSDIAHRI

SEQ ID NO: 7036 - protein, 14 aa, synthetic construct
ETEKVQEFQRLLKE

SEQ ID NO: 7037 - protein, 14 aa, synthetic construct
STTDQREQGFKSEM

SEQ ID NO: 7038 - protein, 14 aa, synthetic construct
DNGEQRKGGALKAF

SEQ ID NO: 7039 - protein, 14 aa, synthetic construct
HADIYDKVSGDMQK

SEQ ID NO: 7040 - protein, 14 aa, synthetic construct
QATRNRVEKAAREV

SEQ ID NO: 7041 - protein, 14 aa, synthetic construct
EAVQKELLAEWKRT

SEQ ID NO: 7042 - protein, 14 aa, synthetic construct
FRAMASDQRELMRT

SEQ ID NO: 7043 - protein, 14 aa, synthetic construct
IDDGLRKTIEWTKA

SEQ ID NO: 7044 - protein, 14 aa, synthetic construct
LADFRQTIDKVDAI

SEQ ID NO: 7045 - protein, 14 aa, synthetic construct
KVTRAIIENEVDKI

SEQ ID NO: 7046 - protein, 14 aa, synthetic construct
SSRLKDVEAGLKII

SEQ ID NO: 7047 - protein, 14 aa, synthetic construct
PVLDEFVNHLNRLR

SEQ ID NO: 7048 - protein, 14 aa, synthetic construct
PKERTEWIKAIQMA

SEQ ID NO: 7049 - protein, 14 aa, synthetic construct
IPQAEKLDQMLKEQ

SEQ ID NO: 7050 - protein, 14 aa, synthetic construct
EKATLEWLKAMKTN

SEQ ID NO: 7051 - protein, 14 aa, synthetic construct
KDLVLSVHNRAIRN

SEQ ID NO: 7052 - protein, 14 aa, synthetic construct
RDDMLAWIKTIQES

SEQ ID NO: 7053 - protein, 14 aa, synthetic construct
QKKADALNAEHIRM

SEQ ID NO: 7054 - protein, 14 aa, synthetic construct
VGDFTVRLRDHLDT

SEQ ID NO: 7055 - protein, 14 aa, synthetic construct
VNSLKKALEELKEK

SEQ ID NO: 7056 - protein, 14 aa, synthetic construct
TYSITKRVKEVLTD

SEQ ID NO: 7057 - protein, 14 aa, synthetic construct
ETALLDWLGTMREK

SEQ ID NO: 7058 - protein, 14 aa, synthetic construct
DNEKNRKLFDLLDV

SEQ ID NO: 7059 - protein, 14 aa, synthetic construct
DPTRERLKAAAQSI

SEQ ID NO: 7060 - protein, 14 aa, synthetic construct
VDEIVENLRKQVKA

SEQ ID NO: 7061 - protein, 14 aa, synthetic construct
VPLTVKEMNRLIDE

SEQ ID NO: 7062 - protein, 14 aa, synthetic construct
AEQVVQGMKEAQER

SEQ ID NO: 7063 - protein, 14 aa, synthetic construct
RELARQTLEVVQEM

SEQ ID NO: 7064 - protein, 14 aa, synthetic construct
AKDVDSRAREVISK

SEQ ID NO: 7065 - protein, 14 aa, synthetic construct
STVREQLKKKLVEV

SEQ ID NO: 7066 - protein, 14 aa, synthetic construct
EKQAKEVLKQHFEK

SEQ ID NO: 7067 - protein, 14 aa, synthetic construct
TVLVHRVHSYLERH

SEQ ID NO: 7068 - protein, 14 aa, synthetic construct
PHHLAQAERNVRAF

SEQ ID NO: 7069 - protein, 14 aa, synthetic construct
VERGITSLHHALEL

SEQ ID NO: 7070 - protein, 14 aa, synthetic construct
DEERKTMMNLMVAA

SEQ ID NO: 7071 - protein, 14 aa, synthetic construct
EGTYRQLIRLHQTE

SEQ ID NO: 7072 - protein, 14 aa, synthetic construct
QNLLDELDNRIIKN

SEQ ID NO: 7073 - protein, 14 aa, synthetic construct
EKTLINKIAELKKF

SEQ ID NO: 7074 - protein, 14 aa, synthetic construct
LDEINKKELSIKEA

SEQ ID NO: 7075 - protein, 14 aa, synthetic construct
KASLNWHQRKHAET

SEQ ID NO: 7076 - protein, 14 aa, synthetic construct
KDTMAKISNELHAI

SEQ ID NO: 7077 - protein, 14 aa, synthetic construct
RDTLERTADEIRAA

SEQ ID NO: 7078 - protein, 14 aa, synthetic construct
PKLTMEYVEQAIKK

SEQ ID NO: 7079 - protein, 14 aa, synthetic construct
PELIQPIQDKIKNE

SEQ ID NO: 7080 - protein, 14 aa, synthetic construct
SKNELSRAFKSLLE

SEQ ID NO: 7081 - protein, 14 aa, synthetic construct
GEAHTRMRRLFNAV

SEQ ID NO: 7082 - protein, 14 aa, synthetic construct
HREHMQRLHDSAKI

SEQ ID NO: 7083 - protein, 14 aa, synthetic construct
PDIEKQVMRQFADT

SEQ ID NO: 7084 - protein, 14 aa, synthetic construct
KSTVTGLVKRLEAD

SEQ ID NO: 7085 - protein, 14 aa, synthetic construct
REKAQELVNAAHEF

SEQ ID NO: 7086 - protein, 14 aa, synthetic construct
VDQKVKSTQDVLKS

SEQ ID NO: 7087 - protein, 14 aa, synthetic construct
DLLQHTANVVKAHK

SEQ ID NO: 7088 - protein, 14 aa, synthetic construct
AKDDRVFQLAVSDL

SEQ ID NO: 7089 - protein, 14 aa, synthetic construct
SADREKLERFSHSE

SEQ ID NO: 7090 - protein, 14 aa, synthetic construct
AETVGRVKRFIQEA

SEQ ID NO: 7091 - protein, 14 aa, synthetic construct
RQKAEQVADEIYQA

SEQ ID NO: 7092 - protein, 14 aa, synthetic construct
VLSKLLRDSHVLHS

SEQ ID NO: 7093 - protein, 14 aa, synthetic construct
IENKAADYLKVSAK

SEQ ID NO: 7094 - protein, 14 aa, synthetic construct
KELRDWIAQTLNDL

SEQ ID NO: 7095 - protein, 14 aa, synthetic construct
ERQIKKQTALVELV

SEQ ID NO: 7096 - protein, 14 aa, synthetic construct
GELGQAVSEGRKKE

SEQ ID NO: 7097 - protein, 14 aa, synthetic construct
EKTGVDKIVEHVKS

SEQ ID NO: 7098 - protein, 14 aa, synthetic construct
AHDRNLASLVEKYL

SEQ ID NO: 7099 - protein, 14 aa, synthetic construct
YNLALDKAIQKLHD

SEQ ID NO: 7100 - protein, 14 aa, synthetic construct
ENTIKTTRRVLELV

SEQ ID NO: 7101 - protein, 14 aa, synthetic construct
LDVRMQLKELAQKE

SEQ ID NO: 7102 - protein, 14 aa, synthetic construct
DDQLKSHVRGALNA

SEQ ID NO: 7103 - protein, 14 aa, synthetic construct
EGQLKLALKTLEKA

SEQ ID NO: 7104 - protein, 14 aa, synthetic construct
ETGKEKLLISKIFT

SEQ ID NO: 7105 - protein, 14 aa, synthetic construct
RLYRELQAVAESLK

SEQ ID NO: 7106 - protein, 14 aa, synthetic construct
NVLTARVLDKLDKY

SEQ ID NO: 7107 - protein, 14 aa, synthetic construct
LNDAMNKATKFLKD

SEQ ID NO: 7108 - protein, 14 aa, synthetic construct
LAAARQHARDVLDQ

SEQ ID NO: 7109 - protein, 14 aa, synthetic construct
QEIQVLRVVKNFEH

SEQ ID NO: 7110 - protein, 14 aa, synthetic construct
TWDLVADIERLRTH

SEQ ID NO: 7111 - protein, 14 aa, synthetic construct
REEAISNMVVALKE

SEQ ID NO: 7112 - protein, 14 aa, synthetic construct
ETYKSNLKIAELKL

SEQ ID NO: 7113 - protein, 15 aa, synthetic construct
EADLSKELAIQVRKV

SEQ ID NO: 7114 - protein, 15 aa, synthetic construct
VEEVNALKNEILKAH

SEQ ID NO: 7115 - protein, 15 aa, synthetic construct
KKITQWLETKGVERL

SEQ ID NO: 7116 - protein, 15 aa, synthetic construct
EDLRTKVENTTKKIF

SEQ ID NO: 7117 - protein, 15 aa, synthetic construct
PTKFAEIVEENLKSA

SEQ ID NO: 7118 - protein, 15 aa, synthetic construct
VFETLKEVSRLVLAR

SEQ ID NO: 7119 - protein, 15 aa, synthetic construct
QIQRELKKLEQRLTA

SEQ ID NO: 7120 - protein, 15 aa, synthetic construct
AKEKTDLVQKFGESL

SEQ ID NO: 7121 - protein, 15 aa, synthetic construct
HRELWAKIANSINDI

SEQ ID NO: 7122 - protein, 15 aa, synthetic construct
WQDISMMRMKTIGEH

SEQ ID NO: 7123 - protein, 15 aa, synthetic construct
TQNLAKFAVDEENKI

SEQ ID NO: 7124 - protein, 15 aa, synthetic construct
SEKAVRELFARARDS

SEQ ID NO: 7125 - protein, 15 aa, synthetic construct
RGTKALMDEVVKATS

SEQ ID NO: 7126 - protein, 15 aa, synthetic construct
LHQAMRAAGDEFETR

SEQ ID NO: 7127 - protein, 15 aa, synthetic construct
LEETKGQINNSIKDL

SEQ ID NO: 7128 - protein, 15 aa, synthetic construct
STEVAERARDLVRAT

SEQ ID NO: 7129 - protein, 15 aa, synthetic construct
RDATLAQAKELWAKV

SEQ ID NO: 7130 - protein, 15 aa, synthetic construct
ERLHNQLKALKQDLA

SEQ ID NO: 7131 - protein, 15 aa, synthetic construct
MDDFIKALRTIKEKS

SEQ ID NO: 7132 - protein, 15 aa, synthetic construct
SDEVQLIKKTWEIPV

SEQ ID NO: 7133 - protein, 15 aa, synthetic construct
PESDKLKSEGNAAMA

SEQ ID NO: 7134 - protein, 15 aa, synthetic construct
VKYKNVAKEVANDIK

SEQ ID NO: 7135 - protein, 15 aa, synthetic construct
RTELLDIAATLFAER

SEQ ID NO: 7136 - protein, 15 aa, synthetic construct
RQLEALIRLSEAHAR

SEQ ID NO: 7137 - protein, 15 aa, synthetic construct
RETKTLIVEAIVRET

SEQ ID NO: 7138 - protein, 15 aa, synthetic construct
ADEVKAMIKEVVSQF

SEQ ID NO: 7139 - protein, 15 aa, synthetic construct
LDEVVAMQKPFVQKH

SEQ ID NO: 7140 - protein, 15 aa, synthetic construct
ASKSISDISFEVDRL

SEQ ID NO: 7141 - protein, 15 aa, synthetic construct
HSTNVLLSLNDQRKK

SEQ ID NO: 7142 - protein, 15 aa, synthetic construct
EETAQKVIKLLNALE

SEQ ID NO: 7143 - protein, 15 aa, synthetic construct
RQALGEAREVIKNLA

SEQ ID NO: 7144 - protein, 15 aa, synthetic construct
ESETKSTLLFGQRAK

SEQ ID NO: 7145 - protein, 15 aa, synthetic construct
AEERKELRTQFQDTT

SEQ ID NO: 7146 - protein, 15 aa, synthetic construct
PDERLKLAQAYKEKT

SEQ ID NO: 7147 - protein, 15 aa, synthetic construct
LSQFRKIVDKVDQTA

SEQ ID NO: 7148 - protein, 15 aa, synthetic construct
DDLHVGLARLWQRLT

SEQ ID NO: 7149 - protein, 15 aa, synthetic construct
DSLMKTQAELLLERL

SEQ ID NO: 7150 - protein, 15 aa, synthetic construct
DRQNKAYKEAMEALK

SEQ ID NO: 7151 - protein, 15 aa, synthetic construct
IDEYRDTLRHLVATT

SEQ ID NO: 7152 - protein, 15 aa, synthetic construct
GEKLYTGLREVVTEH

SEQ ID NO: 7153 - protein, 15 aa, synthetic construct
VQDAVKQIIDYLDTK

SEQ ID NO: 7154 - protein, 15 aa, synthetic construct
DGAVKALETWKTLLD

SEQ ID NO: 7155 - protein, 15 aa, synthetic construct
PETEKVLKYLEATER

SEQ ID NO: 7156 - protein, 15 aa, synthetic construct
HGEISLVLNTLREKE

SEQ ID NO: 7157 - protein, 15 aa, synthetic construct
ANDHIAVLVKKFSLE

SEQ ID NO: 7158 - protein, 15 aa, synthetic construct
PLSLVKKLKKDGLQD

SEQ ID NO: 7159 - protein, 15 aa, synthetic construct
PSDLREKLSELADAK

SEQ ID NO: 7160 - protein, 15 aa, synthetic construct
TGVVRDSMAKLRERL

SEQ ID NO: 7161 - protein, 15 aa, synthetic construct
QRDAENTMRELAVRE

SEQ ID NO: 7162 - protein, 15 aa, synthetic construct
PERVRPALENTLKDL

SEQ ID NO: 7163 - protein, 15 aa, synthetic construct
SESIQKKFQLMKEHV

SEQ ID NO: 7164 - protein, 15 aa, synthetic construct
ENTVNFHQKNMQKKI

SEQ ID NO: 7165 - protein, 15 aa, synthetic construct
DEIKIKLIKTLAFNA

SEQ ID NO: 7166 - protein, 15 aa, synthetic construct
FDTALTDLKTIIRAE

SEQ ID NO: 7167 - protein, 15 aa, synthetic construct
TDDRIKSWVAQLKSE

SEQ ID NO: 7168 - protein, 15 aa, synthetic construct
RLDHNRAISQLAAKT

SEQ ID NO: 7169 - protein, 15 aa, synthetic construct
EKLTFKTDLEKLERE

SEQ ID NO: 7170 - protein, 15 aa, synthetic construct
HHTASESFMKHMQNE

SEQ ID NO: 7171 - protein, 15 aa, synthetic construct
KKLLKEAFQKTLTDL

SEQ ID NO: 7172 - protein, 15 aa, synthetic construct
VDQIRKNYHSLVSQR

SEQ ID NO: 7173 - protein, 15 aa, synthetic construct
DRANFTLLLAELHKA

SEQ ID NO: 7174 - protein, 15 aa, synthetic construct
ESNKENREAHLAAML

SEQ ID NO: 7175 - protein, 15 aa, synthetic construct
HGSDLGKKLLEAANV

SEQ ID NO: 7176 - protein, 15 aa, synthetic construct
AADRLNYLKDLSRSH

SEQ ID NO: 7177 - protein, 15 aa, synthetic construct
KFQEAVEKVTQHIHG

SEQ ID NO: 7178 - protein, 15 aa, synthetic construct
RAAWAAQLAQLREDE

SEQ ID NO: 7179 - protein, 15 aa, synthetic construct
MDEVQNRIKEILDKH

SEQ ID NO: 7180 - protein, 15 aa, synthetic construct
PERVTQAIREWLRKV

SEQ ID NO: 7181 - protein, 15 aa, synthetic construct
NEKVGELQAKALVDI

SEQ ID NO: 7182 - protein, 15 aa, synthetic construct
ANGYLDKLAQELGRK

SEQ ID NO: 7183 - protein, 15 aa, synthetic construct
RQAIFETLVAKGREL

SEQ ID NO: 7184 - protein, 15 aa, synthetic construct
PDQQRDFQREIQILK

SEQ ID NO: 7185 - protein, 15 aa, synthetic construct
VGEVSKLVKKALSNE

SEQ ID NO: 7186 - protein, 15 aa, synthetic construct
PQMVRDTQQLLKETR

SEQ ID NO: 7187 - protein, 15 aa, synthetic construct
LTKHLQVFRDHLINQ

SEQ ID NO: 7188 - protein, 15 aa, synthetic construct
EEMTKQAEKWIKDNL

SEQ ID NO: 7189 - protein, 15 aa, synthetic construct
REERAQLIATARKAV

SEQ ID NO: 7190 - protein, 15 aa, synthetic construct
TESAKEAYVKLLDTL

SEQ ID NO: 7191 - protein, 15 aa, synthetic construct
EKDRNDLITYLKKAT

SEQ ID NO: 7192 - protein, 15 aa, synthetic construct
KADLIATARKTWDER

SEQ ID NO: 7193 - protein, 15 aa, synthetic construct
HEGRAAQKRLETLLE

SEQ ID NO: 7194 - protein, 15 aa, synthetic construct
KEAATAVAKAFEQET

SEQ ID NO: 7195 - protein, 15 aa, synthetic construct
LGHQVASDYLRIMER

SEQ ID NO: 7196 - protein, 15 aa, synthetic construct
VEQNLKHVVTIKREL

SEQ ID NO: 7197 - protein, 15 aa, synthetic construct
MEEHTQVIKEIIRVA

SEQ ID NO: 7198 - protein, 15 aa, synthetic construct
ERQVRIQLKDHIDRT

SEQ ID NO: 7199 - protein, 15 aa, synthetic construct
DEVFGAVKDRQRNLL

SEQ ID NO: 7200 - protein, 15 aa, synthetic construct
LKELDFKIRQQLVNN

SEQ ID NO: 7201 - protein, 15 aa, synthetic construct
TPNEKLLGHLVKEKY

SEQ ID NO: 7202 - protein, 15 aa, synthetic construct
SKEKWNDIDQIATSL

SEQ ID NO: 7203 - protein, 15 aa, synthetic construct
WKEDVKKMIVLSLTR

SEQ ID NO: 7204 - protein, 15 aa, synthetic construct
GRDLTDYLMKILTER

SEQ ID NO: 7205 - protein, 15 aa, synthetic construct
KSLMKEAFQKTLSDL

SEQ ID NO: 7206 - protein, 15 aa, synthetic construct
EAETKSTLMFGQRAK

SEQ ID NO: 7207 - protein, 15 aa, synthetic construct
FKDIKKIMEEKIQIS

SEQ ID NO: 7208 - protein, 15 aa, synthetic construct
DEVRKTNLAGLMDGY

SEQ ID NO: 7209 - protein, 15 aa, synthetic construct
TARLDRLMLERVLEQ

SEQ ID NO: 7210 - protein, 15 aa, synthetic construct
YREAVLRAVDRLNEQ

SEQ ID NO: 7211 - protein, 15 aa, synthetic construct
HGAATANESFKRARA

SEQ ID NO: 7212 - protein, 15 aa, synthetic construct
IKERTIKIGKYIVET

SEQ ID NO: 7213 - protein, 15 aa, synthetic construct
VSDLKKYIAELEVQT

SEQ ID NO: 7214 - protein, 15 aa, synthetic construct
SEEKVALYRHVVSVV

SEQ ID NO: 7215 - protein, 15 aa, synthetic construct
LPIIKDHLNDLYRQA

SEQ ID NO: 7216 - protein, 15 aa, synthetic construct
LATQAVQEIKHSLDH

SEQ ID NO: 7217 - protein, 15 aa, synthetic construct
EKDTVLEVLKSFRRA

SEQ ID NO: 7218 - protein, 15 aa, synthetic construct
EVAYLDRASQLVLRD

SEQ ID NO: 7219 - protein, 15 aa, synthetic construct
GINIRQKVKELVEFA

SEQ ID NO: 7220 - protein, 15 aa, synthetic construct
QALLERIRAKEVQKQ

SEQ ID NO: 7221 - protein, 15 aa, synthetic construct
LMKDLIQTALEEMRQ

SEQ ID NO: 7222 - protein, 15 aa, synthetic construct
QDEVKELNRLLGKVI

SEQ ID NO: 7223 - protein, 15 aa, synthetic construct
RDIDAMKSVAEASHK

SEQ ID NO: 7224 - protein, 15 aa, synthetic construct
EASIAISQARLDEKI

SEQ ID NO: 7225 - protein, 15 aa, synthetic construct
LASRTRHLASVLDKL

SEQ ID NO: 7226 - protein, 15 aa, synthetic construct
PQVTVDKLKRLENDF

SEQ ID NO: 7227 - protein, 15 aa, synthetic construct
GAEANAITREILKDI

SEQ ID NO: 7228 - protein, 15 aa, synthetic construct
PTTSARALRDFVVED

SEQ ID NO: 7229 - protein, 15 aa, synthetic construct
RSDLHATLVDAARAA

SEQ ID NO: 7230 - protein, 15 aa, synthetic construct
RDDAIAWKTALMEAN

SEQ ID NO: 7231 - protein, 15 aa, synthetic construct
LGAFEHNIQTLKDRL

SEQ ID NO: 7232 - protein, 15 aa, synthetic construct
VQASDRLMKELRDIY

SEQ ID NO: 7233 - protein, 15 aa, synthetic construct
LEDLVRYVESKISRT

SEQ ID NO: 7234 - protein, 15 aa, synthetic construct
RGTKSLMDEVVKATS

SEQ ID NO: 7235 - protein, 15 aa, synthetic construct
YKEAVLRAIDGINQR

SEQ ID NO: 7236 - protein, 15 aa, synthetic construct
KDDQAKKVQEHLNKT

SEQ ID NO: 7237 - protein, 15 aa, synthetic construct
REMVDQINRVARQVI

SEQ ID NO: 7238 - protein, 15 aa, synthetic construct
SHVAERQARAAKDEL

SEQ ID NO: 7239 - protein, 15 aa, synthetic construct
DKSLDTFVSKVGEIV

SEQ ID NO: 7240 - protein, 15 aa, synthetic construct
DRTAGVLRDTLDQLY

SEQ ID NO: 7241 - protein, 15 aa, synthetic construct
KLETYLNKVEAEAKA

SEQ ID NO: 7242 - protein, 15 aa, synthetic construct
TEELKNFLKDLLEKA

SEQ ID NO: 7243 - protein, 15 aa, synthetic construct
YKKRLNELITDALIT

SEQ ID NO: 7244 - protein, 15 aa, synthetic construct
IPELRERIKNVAEKT

SEQ ID NO: 7245 - protein, 15 aa, synthetic construct
LTEKAIGDVFSLLEK

SEQ ID NO: 7246 - protein, 15 aa, synthetic construct
DEAINRAAINVGKKR

SEQ ID NO: 7247 - protein, 15 aa, synthetic construct
IAEISRELKTLAREL

SEQ ID NO: 7248 - protein, 15 aa, synthetic construct
ERVQKHLKALTSELA

SEQ ID NO: 7249 - protein, 15 aa, synthetic construct
PKEMKEFLDEHQKMT

SEQ ID NO: 7250 - protein, 15 aa, synthetic construct
EEGREAVSQIAASIK

SEQ ID NO: 7251 - protein, 15 aa, synthetic construct
AADLKAVQDKLKTFV

SEQ ID NO: 7252 - protein, 15 aa, synthetic construct
KDEVKELIWKSSLEV

SEQ ID NO: 7253 - protein, 15 aa, synthetic construct
IIPRTLHQIFEKLTD

SEQ ID NO: 7254 - protein, 15 aa, synthetic construct
IKDVHARLQALAQAH

SEQ ID NO: 7255 - protein, 15 aa, synthetic construct
AHQVQKQTLKEILLK

SEQ ID NO: 7256 - protein, 15 aa, synthetic construct
FKQKIISILEDKKAV

SEQ ID NO: 7257 - protein, 15 aa, synthetic construct
LESSHALAHALKMMR

SEQ ID NO: 7258 - protein, 15 aa, synthetic construct
MVSVVHDLQKAIAEK

SEQ ID NO: 7259 - protein, 15 aa, synthetic construct
AEETLKALKGSVKDL

SEQ ID NO: 7260 - protein, 15 aa, synthetic construct
HWNRLRDDAANLKSK

SEQ ID NO: 7261 - protein, 15 aa, synthetic construct
FVENVMKKAIDSLKE

SEQ ID NO: 7262 - protein, 15 aa, synthetic construct
EELVKWGKRVAAANS

SEQ ID NO: 7263 - protein, 15 aa, synthetic construct
KSRLIDRASQLLEVI

SEQ ID NO: 7264 - protein, 15 aa, synthetic construct
RESVHRLVENVAERF

SEQ ID NO: 7265 - protein, 15 aa, synthetic construct
TPDGIIKADKVFNKV

SEQ ID NO: 7266 - protein, 15 aa, synthetic construct
YDDTVRLTMQHAQQH

SEQ ID NO: 7267 - protein, 15 aa, synthetic construct
ARVRNQFLKEMDGLA

SEQ ID NO: 7268 - protein, 15 aa, synthetic construct
LADFRQTIDKVDAIA

SEQ ID NO: 7269 - protein, 15 aa, synthetic construct
EVKLLVERMMALQTD

SEQ ID NO: 7270 - protein, 15 aa, synthetic construct
VKDRLADIKSEIDLT

SEQ ID NO: 7271 - protein, 15 aa, synthetic construct
RDHWKRVMQGHAGAN

SEQ ID NO: 7272 - protein, 15 aa, synthetic construct
GRAVNHIKSVWKDLL

SEQ ID NO: 7273 - protein, 15 aa, synthetic construct
TLIDQAKDRIQKTKS

SEQ ID NO: 7274 - protein, 15 aa, synthetic construct
VEEWLTHARKVTQEA

SEQ ID NO: 7275 - protein, 15 aa, synthetic construct
HREHMQRLHDSAKIY

SEQ ID NO: 7276 - protein, 15 aa, synthetic construct
LQAVLKEDQEKLKLL

SEQ ID NO: 7277 - protein, 15 aa, synthetic construct
SPMAEALFKSIAERE

SEQ ID NO: 7278 - protein, 15 aa, synthetic construct
REEVIKTLVDMVAKS

SEQ ID NO: 7279 - protein, 15 aa, synthetic construct
QLEKLMENMRNDIAS

SEQ ID NO: 7280 - protein, 15 aa, synthetic construct
RDQVKQILVEMVAKS

SEQ ID NO: 7281 - protein, 15 aa, synthetic construct
LDTLKKDIALGQEFV

SEQ ID NO: 7282 - protein, 15 aa, synthetic construct
PAELRAAGRADLTTR

SEQ ID NO: 7283 - protein, 15 aa, synthetic construct
MSAVSLKIVEKAKEA

SEQ ID NO: 7284 - protein, 15 aa, synthetic construct
LKGEVESIKKQINRQ

SEQ ID NO: 7285 - protein, 15 aa, synthetic construct
LNAFRELRTQLEKAL

SEQ ID NO: 7286 - protein, 15 aa, synthetic construct
AQEIDLKVRKFLIAQ

SEQ ID NO: 7287 - protein, 15 aa, synthetic construct
HTALKDIANKYSEKT

SEQ ID NO: 7288 - protein, 15 aa, synthetic construct
KALDKVEKVLVSAQQ

SEQ ID NO: 7289 - protein, 15 aa, synthetic construct
HDHAVVSGRLAGENM

SEQ ID NO: 7290 - protein, 15 aa, synthetic construct
SEDAVNMARVLALKE

SEQ ID NO: 7291 - protein, 15 aa, synthetic construct
EADIERTIAAARTVL

SEQ ID NO: 7292 - protein, 15 aa, synthetic construct
RTEAANVEKITTKLL

SEQ ID NO: 7293 - protein, 15 aa, synthetic construct
GKNAELISEKILKEM

SEQ ID NO: 7294 - protein, 15 aa, synthetic construct
KTTVINEVYHRLVKD

SEQ ID NO: 7295 - protein, 15 aa, synthetic construct
RSHLHDALVNRARAL

SEQ ID NO: 7296 - protein, 15 aa, synthetic construct
IMQILTRVNDRVARH

SEQ ID NO: 7297 - protein, 15 aa, synthetic construct
PLGDANETKALKRAF

SEQ ID NO: 7298 - protein, 15 aa, synthetic construct
NWQKQMLDRLNEAVK

SEQ ID NO: 7299 - protein, 15 aa, synthetic construct
DRLRQFIGELATLLD

SEQ ID NO: 7300 - protein, 15 aa, synthetic construct
NGHALLMTDTRKRLL

SEQ ID NO: 7301 - protein, 15 aa, synthetic construct
MGAILETQRELREVL

SEQ ID NO: 7302 - protein, 15 aa, synthetic construct
HDAFIASVDESLRKL

SEQ ID NO: 7303 - protein, 15 aa, synthetic construct
KLTFKTDLEKLEREK

SEQ ID NO: 7304 - protein, 15 aa, synthetic construct
PHVLRHAFATHLLNH

SEQ ID NO: 7305 - protein, 15 aa, synthetic construct
LDQIDQRIAAVFHHL

SEQ ID NO: 7306 - protein, 15 aa, synthetic construct
RETLEISYRNAIARL

SEQ ID NO: 7307 - protein, 15 aa, synthetic construct
ADARKKLEDSAELLT

SEQ ID NO: 7308 - protein, 15 aa, synthetic construct
SEAVVRLAEASQDRY

SEQ ID NO: 7309 - protein, 15 aa, synthetic construct
KDKFHQLLHELVEKN

SEQ ID NO: 7310 - protein, 15 aa, synthetic construct
PQKAMEEYKEKLKAQ

SEQ ID NO: 7311 - protein, 15 aa, synthetic construct
DAETLSTLRFGMRAK

SEQ ID NO: 7312 - protein, 15 aa, synthetic construct
IYEQIVQKIKEQVVK

SEQ ID NO: 7313 - protein, 15 aa, synthetic construct
REGVKELARQTAELL

SEQ ID NO: 7314 - protein, 15 aa, synthetic construct
KDKLAEISYEAVKSV

SEQ ID NO: 7315 - protein, 15 aa, synthetic construct
QEADTLRFVSALRAR

SEQ ID NO: 7316 - protein, 15 aa, synthetic construct
LEHLAERIANRINSQ

SEQ ID NO: 7317 - protein, 15 aa, synthetic construct
RAKLLNVGFQEALKD

SEQ ID NO: 7318 - protein, 15 aa, synthetic construct
IAQARKLVEQLKMEA

SEQ ID NO: 7319 - protein, 15 aa, synthetic construct
PIVEKILQYRELTKL

SEQ ID NO: 7320 - protein, 15 aa, synthetic construct
PRLREAIAQKLQRDN

SEQ ID NO: 7321 - protein, 15 aa, synthetic construct
THKLADDVLQLLDNR

SEQ ID NO: 7322 - protein, 15 aa, synthetic construct
VEKVLKTRYHDATSK

SEQ ID NO: 7323 - protein, 15 aa, synthetic construct
DDQARHLADLTRLGM

SEQ ID NO: 7324 - protein, 15 aa, synthetic construct
VAESKKLLKKIFDQL

SEQ ID NO: 7325 - protein, 15 aa, synthetic construct
EKALELAVAQIEKSY

SEQ ID NO: 7326 - protein, 15 aa, synthetic construct
HHHHMQQIQRDIAQA

SEQ ID NO: 7327 - protein, 15 aa, synthetic construct
LKKGIDLFEQILKQL

SEQ ID NO: 7328 - protein, 15 aa, synthetic construct
SKGGNLIADELAEKY

SEQ ID NO: 7329 - protein, 15 aa, synthetic construct
GDKELEWLIGRSLIQ

SEQ ID NO: 7330 - protein, 15 aa, synthetic construct
RDQVFAAVEQARKTL

SEQ ID NO: 7331 - protein, 15 aa, synthetic construct
HSEIIIKAFNRVVDK

SEQ ID NO: 7332 - protein, 15 aa, synthetic construct
RDQFRSTLADAAKTL

SEQ ID NO: 7333 - protein, 15 aa, synthetic construct
KEFITNRINDTVKKA

SEQ ID NO: 7334 - protein, 15 aa, synthetic construct
ALESKAKVDQLAQDY

SEQ ID NO: 7335 - protein, 15 aa, synthetic construct
WEHAIDTARDLKNIL

SEQ ID NO: 7336 - protein, 15 aa, synthetic construct
TGEHLEVLSKLAGKF

SEQ ID NO: 7337 - protein, 15 aa, synthetic construct
EKSVMDGAKAVLDTL

SEQ ID NO: 7338 - protein, 15 aa, synthetic construct
EHTRLRGLVSDAFTR

SEQ ID NO: 7339 - protein, 15 aa, synthetic construct
TDDVKSIVRFVQEHS

SEQ ID NO: 7340 - protein, 15 aa, synthetic construct
AEDVKVLKSVKKQIS

SEQ ID NO: 7341 - protein, 15 aa, synthetic construct
EKDRNDLITYLKKAS

SEQ ID NO: 7342 - protein, 15 aa, synthetic construct
ISDKLMVHLVERVQR

SEQ ID NO: 7343 - protein, 15 aa, synthetic construct
RVGFDALLREHVSTH

SEQ ID NO: 7344 - protein, 15 aa, synthetic construct
GSHMAVSKVMEKILR

SEQ ID NO: 7345 - protein, 15 aa, synthetic construct
EASRKSLYDLTKSLV

SEQ ID NO: 7346 - protein, 15 aa, synthetic construct
EAQKTLAEEVTKFIH

SEQ ID NO: 7347 - protein, 15 aa, synthetic construct
MEVLKRVLKSMDETA

SEQ ID NO: 7348 - protein, 15 aa, synthetic construct
PGEFKTLISKERKSH

SEQ ID NO: 7349 - protein, 15 aa, synthetic construct
ASGEARRNGATEAFK

SEQ ID NO: 7350 - protein, 15 aa, synthetic construct
NAEALILEMNLIKKH

SEQ ID NO: 7351 - protein, 15 aa, synthetic construct
EKALELAMAQIDKNF

SEQ ID NO: 7352 - protein, 15 aa, synthetic construct
YGDLKARVDQVRQAT

SEQ ID NO: 7353 - protein, 15 aa, synthetic construct
LKETIDDTASQILKF

SEQ ID NO: 7354 - protein, 15 aa, synthetic construct
EIAKETQARVLETIL

SEQ ID NO: 7355 - protein, 15 aa, synthetic construct
VQLDTAVVRALRERF

SEQ ID NO: 7356 - protein, 15 aa, synthetic construct
NKEGLELLKTAIGKA

SEQ ID NO: 7357 - protein, 15 aa, synthetic construct
LSTAQKIIKEARDAL

SEQ ID NO: 7358 - protein, 15 aa, synthetic construct
PLSLVRDHRAKDVLT

SEQ ID NO: 7359 - protein, 15 aa, synthetic construct
RKSIKQLAEVAEREM

SEQ ID NO: 7360 - protein, 15 aa, synthetic construct
RSDLNARILKSVVDQ

SEQ ID NO: 7361 - protein, 15 aa, synthetic construct
EIAKETQARVLEAIL

SEQ ID NO: 7362 - protein, 15 aa, synthetic construct
EKVESEIKKVENFLR

SEQ ID NO: 7363 - protein, 15 aa, synthetic construct
QALREAIAQKTERLY

SEQ ID NO: 7364 - protein, 15 aa, synthetic construct
KLDAQIKNISDALGK

SEQ ID NO: 7365 - protein, 15 aa, synthetic construct
EKLDAQIKNISDALG

SEQ ID NO: 7366 - protein, 15 aa, synthetic construct
DQHRQELVNWVDKVG

SEQ ID NO: 7367 - protein, 15 aa, synthetic construct
REEAISNMVVALKEL

SEQ ID NO: 7368 - protein, 15 aa, synthetic construct
KETVEAWSARIKEQL

SEQ ID NO: 7369 - protein, 15 aa, synthetic construct
GQQEAARAGELLKEK

SEQ ID NO: 7370 - protein, 15 aa, synthetic construct
KETKGHIFRAVENAL

SEQ ID NO: 7371 - protein, 15 aa, synthetic construct
SKVIIDRVTEYLESH

SEQ ID NO: 7372 - protein, 15 aa, synthetic construct
SVIGREAKAQILEAE

SEQ ID NO: 7373 - protein, 15 aa, synthetic construct
TYEMNRIQDAIKKLN

SEQ ID NO: 7374 - protein, 15 aa, synthetic construct
WVDKVKDLTKSEMNI

SEQ ID NO: 7375 - protein, 15 aa, synthetic construct
REELTAVMRFLTQRL

SEQ ID NO: 7376 - protein, 15 aa, synthetic construct
VDDIVTKIKSYTTEQ

SEQ ID NO: 7377 - protein, 15 aa, synthetic construct
LPDVDRAVLRTQAKL

SEQ ID NO: 7378 - protein, 15 aa, synthetic construct
RPEREKLMQTVSSMF

SEQ ID NO: 7379 - protein, 15 aa, synthetic construct
YKIATSIDKAIDRIL

SEQ ID NO: 7380 - protein, 15 aa, synthetic construct
EKDVQTALALAKGKF

SEQ ID NO: 7381 - protein, 15 aa, synthetic construct
REKALELAMAQIDKN

SEQ ID NO: 7382 - protein, 15 aa, synthetic construct
VIMDLIQRTKDAVRE

SEQ ID NO: 7383 - protein, 15 aa, synthetic construct
IKKVRASVLYNQDEH

SEQ ID NO: 7384 - protein, 15 aa, synthetic construct
KDDVYEISKLILKSI

SEQ ID NO: 7385 - protein, 15 aa, synthetic construct
PEAATRAVFKVLSRE

SEQ ID NO: 7386 - protein, 15 aa, synthetic construct
TVEMLVKVISEHKNR

SEQ ID NO: 7387 - protein, 15 aa, synthetic construct
LESAIQKVVEKISHR

SEQ ID NO: 7388 - protein, 15 aa, synthetic construct
PEIINEMTRMRMEML

SEQ ID NO: 7389 - protein, 15 aa, synthetic construct
RGQFDLLLLKHAEEQ

SEQ ID NO: 7390 - protein, 15 aa, synthetic construct
PELKAKMETLKEVIT

SEQ ID NO: 7391 - protein, 15 aa, synthetic construct
NLDSARFRHLMGEKL

SEQ ID NO: 7392 - protein, 15 aa, synthetic construct
TDVANEIEKKIKEKL

SEQ ID NO: 7393 - protein, 15 aa, synthetic construct
RLDHNRALSQIAAKT

SEQ ID NO: 7394 - protein, 15 aa, synthetic construct
PEHTIAAAKVILKKS

SEQ ID NO: 7395 - protein, 15 aa, synthetic construct
KNARNDFLKEVKIMS

SEQ ID NO: 7396 - protein, 15 aa, synthetic construct
EKAVEKVEKQVNDAV

SEQ ID NO: 7397 - protein, 15 aa, synthetic construct
KDKIIDNAITLFSEK

SEQ ID NO: 7398 - protein, 15 aa, synthetic construct
LKDAINEALRDWVAT

SEQ ID NO: 7399 - protein, 15 aa, synthetic construct
THADHARSFHALHQT

SEQ ID NO: 7400 - protein, 15 aa, synthetic construct
DEISDTLRTRLVALT

SEQ ID NO: 7401 - protein, 15 aa, synthetic construct
LKSTFDDIKKIISKQ

SEQ ID NO: 7402 - protein, 15 aa, synthetic construct
DEQRKLLKEAQAEHN

SEQ ID NO: 7403 - protein, 15 aa, synthetic construct
TNAMQDIATQFKKEK

SEQ ID NO: 7404 - protein, 15 aa, synthetic construct
GGINRKRALLELEKS

SEQ ID NO: 7405 - protein, 15 aa, synthetic construct
AKERASLMKAHGETG

SEQ ID NO: 7406 - protein, 15 aa, synthetic construct
MRERIEFLNEASVMK

SEQ ID NO: 7407 - protein, 15 aa, synthetic construct
RPRITELVGQLLDEL

SEQ ID NO: 7408 - protein, 15 aa, synthetic construct
MTLAKQEAKLVHEKI

SEQ ID NO: 7409 - protein, 15 aa, synthetic construct
VKEAQAAAEQLKTTR

SEQ ID NO: 7410 - protein, 15 aa, synthetic construct
EKSALAYLEKHTARL

SEQ ID NO: 7411 - protein, 15 aa, synthetic construct
EVIDKIQKKTREFLN

SEQ ID NO: 7412 - protein, 15 aa, synthetic construct
SERYGRVILDRVEQR

SEQ ID NO: 7413 - protein, 15 aa, synthetic construct
KVDRILALAETNAEL

SEQ ID NO: 7414 - protein, 15 aa, synthetic construct
AGTKERMRDILREIQ

SEQ ID NO: 7415 - protein, 15 aa, synthetic construct
SNKENREAHLAAMLE

SEQ ID NO: 7416 - protein, 15 aa, synthetic construct
KLHSQANLMRLKSDL

SEQ ID NO: 7417 - protein, 15 aa, synthetic construct
GASRVRDLFETAKKQ

SEQ ID NO: 7418 - protein, 15 aa, synthetic construct
AESIVREFVQEAVRK

SEQ ID NO: 7419 - protein, 15 aa, synthetic construct
SQNRGRELVEKMKDL

SEQ ID NO: 7420 - protein, 15 aa, synthetic construct
RAQRKLALTTIIEHT

SEQ ID NO: 7421 - protein, 15 aa, synthetic construct
LEALESNLKKLGDWL

SEQ ID NO: 7422 - protein, 15 aa, synthetic construct
FRDLALRVDQIRDNM

SEQ ID NO: 7423 - protein, 15 aa, synthetic construct
TDEKERILKTVIDLV

SEQ ID NO: 7424 - protein, 15 aa, synthetic construct
PKERTEWIKAIQMAS

SEQ ID NO: 7425 - protein, 15 aa, synthetic construct
EATLQAMDEKLRKWK

SEQ ID NO: 7426 - protein, 15 aa, synthetic construct
LETVAELIASKTLEK

SEQ ID NO: 7427 - protein, 15 aa, synthetic construct
IHEGLKLANEQIQKA

SEQ ID NO: 7428 - protein, 15 aa, synthetic construct
PAQADLEFLENAKKL

SEQ ID NO: 7429 - protein, 15 aa, synthetic construct
VELRDELAAYITKQT

SEQ ID NO: 7430 - protein, 15 aa, synthetic construct
TNNRMELKAAIEGLK

SEQ ID NO: 7431 - protein, 15 aa, synthetic construct
DKAIDNTVRRANTIT

SEQ ID NO: 7432 - protein, 15 aa, synthetic construct
EKDRNDLITYMTKAA

SEQ ID NO: 7433 - protein, 15 aa, synthetic construct
EATVKTHLVHIYSKL

SEQ ID NO: 7434 - protein, 15 aa, synthetic construct
SREMRLVASYLKEAQ

SEQ ID NO: 7435 - protein, 15 aa, synthetic construct
AQELDIKARNFLINK

SEQ ID NO: 7436 - protein, 15 aa, synthetic construct
ERKDFIKTTVKELIS

SEQ ID NO: 7437 - protein, 15 aa, synthetic construct
EGDLFTQLRKIVKMA

SEQ ID NO: 7438 - protein, 15 aa, synthetic construct
KPLNNFAAEVGKIRD

SEQ ID NO: 7439 - protein, 15 aa, synthetic construct
KEFIRKIVQAKQSAD

SEQ ID NO: 7440 - protein, 15 aa, synthetic construct
RKELETFIKNGIDST

SEQ ID NO: 7441 - protein, 15 aa, synthetic construct
LRTRMGHTMALERLA

SEQ ID NO: 7442 - protein, 15 aa, synthetic construct
TEKVVFQETKAIADN

SEQ ID NO: 7443 - protein, 15 aa, synthetic construct
IVQALEETFRIGREL

SEQ ID NO: 7444 - protein, 15 aa, synthetic construct
SNVVRELIERVSDKL

SEQ ID NO: 7445 - protein, 15 aa, synthetic construct
SSDVVSYVRDQLRKH

SEQ ID NO: 7446 - protein, 15 aa, synthetic construct
PLVTKVHMEVARASR

SEQ ID NO: 7447 - protein, 15 aa, synthetic construct
LSVMKETYETVMKKG

SEQ ID NO: 7448 - protein, 15 aa, synthetic construct
RDKLNMQLQRIIDEA

SEQ ID NO: 7449 - protein, 15 aa, synthetic construct
VQATDRLMKELRDIY

SEQ ID NO: 7450 - protein, 15 aa, synthetic construct
RDEVVNTRFSALLKE

SEQ ID NO: 7451 - protein, 15 aa, synthetic construct
EEGSAYNEKLIPISR

SEQ ID NO: 7452 - protein, 15 aa, synthetic construct
WTKASQQINQHVKDK

SEQ ID NO: 7453 - protein, 15 aa, synthetic construct
DEVKIKVLQRLSIAS

SEQ ID NO: 7454 - protein, 15 aa, synthetic construct
RAEAEAEVQRSVERF

SEQ ID NO: 7455 - protein, 15 aa, synthetic construct
AEVRQATAEAERAVA

SEQ ID NO: 7456 - protein, 15 aa, synthetic construct
KEVAKKMVEYIIVNS

SEQ ID NO: 7457 - protein, 15 aa, synthetic construct
AAQKTLAEEVTKLVH

SEQ ID NO: 7458 - protein, 15 aa, synthetic construct
LDELNKALRLEALTR

SEQ ID NO: 7459 - protein, 15 aa, synthetic construct
VEQDLKHVVTIKREL

SEQ ID NO: 7460 - protein, 15 aa, synthetic construct
ENTEKLLKILRDNVS

SEQ ID NO: 7461 - protein, 15 aa, synthetic construct
KLVTKIIAHELAHQW

SEQ ID NO: 7462 - protein, 15 aa, synthetic construct
GEDARAALTTLSERV

SEQ ID NO: 7463 - protein, 15 aa, synthetic construct
ATYEIDRVLSQLLKE

SEQ ID NO: 7464 - protein, 15 aa, synthetic construct
NEYLNLVGRLRKIID

SEQ ID NO: 7465 - protein, 15 aa, synthetic construct
PRELKTDLTAFVEQV

SEQ ID NO: 7466 - protein, 15 aa, synthetic construct
AESVTAVKEAEKAIR

SEQ ID NO: 7467 - protein, 15 aa, synthetic construct
SIQRRIKKVTHDMDM

SEQ ID NO: 7468 - protein, 15 aa, synthetic construct
AAITHTARMADKLRL

SEQ ID NO: 7469 - protein, 15 aa, synthetic construct
TKHLHNDVEKERKEK

SEQ ID NO: 7470 - protein, 15 aa, synthetic construct
ALSKSMAEIIRADMR

SEQ ID NO: 7471 - protein, 15 aa, synthetic construct
ALEFLLKAHQTAVDK

SEQ ID NO: 7472 - protein, 15 aa, synthetic construct
ADAVFAEVHRANLSK

SEQ ID NO: 7473 - protein, 15 aa, synthetic construct
ERELEQLSRGWVRGL

SEQ ID NO: 7474 - protein, 15 aa, synthetic construct
TGDRLNFGLAAEKAR

SEQ ID NO: 7475 - protein, 15 aa, synthetic construct
PDFLKKSVDESLKRL

SEQ ID NO: 7476 - protein, 15 aa, synthetic construct
HWNRLNSDASNLKSK

SEQ ID NO: 7477 - protein, 15 aa, synthetic construct
DIQMVESIKRYLERK

SEQ ID NO: 7478 - protein, 15 aa, synthetic construct
DEARINQLFLTALDK

SEQ ID NO: 7479 - protein, 15 aa, synthetic construct
AATLEEKLNKIFEKL

SEQ ID NO: 7480 - protein, 15 aa, synthetic construct
AADVEVSLRASLHRL

SEQ ID NO: 7481 - protein, 15 aa, synthetic construct
RKLLKEAFQKTLTDL

SEQ ID NO: 7482 - protein, 15 aa, synthetic construct
MVQALNRALDEEMAK

SEQ ID NO: 7483 - protein, 15 aa, synthetic construct
QFEKLMENMRNDIAS

SEQ ID NO: 7484 - protein, 15 aa, synthetic construct
ESQAERVRAELARFL

SEQ ID NO: 7485 - protein, 15 aa, synthetic construct
GLVNKAIQDMISKHH

SEQ ID NO: 7486 - protein, 15 aa, synthetic construct
RAQELMIVLEEYIRT

SEQ ID NO: 7487 - protein, 15 aa, synthetic construct
THSLARFAVDQHNTK

SEQ ID NO: 7488 - protein, 15 aa, synthetic construct
RTSKVRQLLDTTDIQ

SEQ ID NO: 7489 - protein, 15 aa, synthetic construct
DLLKHTTNVVKAHTN

SEQ ID NO: 7490 - protein, 15 aa, synthetic construct
EDEARAIVAARLNTL

SEQ ID NO: 7491 - protein, 15 aa, synthetic construct
VYKSAEAVDLATKEL

SEQ ID NO: 7492 - protein, 15 aa, synthetic construct
PLKTLETLRKEVGAY

SEQ ID NO: 7493 - protein, 15 aa, synthetic construct
HEYHAETIKNVRTAT

SEQ ID NO: 7494 - protein, 15 aa, synthetic construct
GMRTYLDLLQHVLDH

SEQ ID NO: 7495 - protein, 15 aa, synthetic construct
ETMRERTLFDRARGL

SEQ ID NO: 7496 - protein, 15 aa, synthetic construct
EKAQQEYRKTLEKII

SEQ ID NO: 7497 - protein, 15 aa, synthetic construct
NSIKDKFEQALIDRV

SEQ ID NO: 7498 - protein, 15 aa, synthetic construct
EKLKIKAQSYLDAIQ

SEQ ID NO: 7499 - protein, 15 aa, synthetic construct
VERLKQVLLHQQAKF

SEQ ID NO: 7500 - protein, 15 aa, synthetic construct
RARYVTLAARLEQET

SEQ ID NO: 7501 - protein, 15 aa, synthetic construct
QMEKLKGALDLLEQF

SEQ ID NO: 7502 - protein, 15 aa, synthetic construct
RNEARMLVDNRLRQL

SEQ ID NO: 7503 - protein, 15 aa, synthetic construct
IENKAADYLKVSAKN

SEQ ID NO: 7504 - protein, 15 aa, synthetic construct
LKEIIDELGKQAKEQ

SEQ ID NO: 7505 - protein, 15 aa, synthetic construct
DADILSWANRKVRTM

SEQ ID NO: 7506 - protein, 15 aa, synthetic construct
ERTLDLAMQRLKAFV

SEQ ID NO: 7507 - protein, 15 aa, synthetic construct
GAESVLQVFREAKAE

SEQ ID NO: 7508 - protein, 15 aa, synthetic construct
RELATQIYHETLKIT

SEQ ID NO: 7509 - protein, 15 aa, synthetic construct
FTRLGQLAEDIQKEI

SEQ ID NO: 7510 - protein, 15 aa, synthetic construct
SDDVKKAIIEGTKAY

SEQ ID NO: 7511 - protein, 15 aa, synthetic construct
EAVDQLVKFNRALAD

SEQ ID NO: 7512 - protein, 15 aa, synthetic construct
EYVRKSVGNALRDIS

SEQ ID NO: 7513 - protein, 15 aa, synthetic construct
ADTLERVTKIIVDRL

SEQ ID NO: 7514 - protein, 15 aa, synthetic construct
ASQYIGDLIHKDIKE

SEQ ID NO: 7515 - protein, 15 aa, synthetic construct
YRQRLTDLGAIAKAE

SEQ ID NO: 7516 - protein, 15 aa, synthetic construct
SDDVKRAIEKGTNDY

SEQ ID NO: 7517 - protein, 15 aa, synthetic construct
LSQLESVMKELYRES

SEQ ID NO: 7518 - protein, 15 aa, synthetic construct
THEIQRMIGRAMRTA

SEQ ID NO: 7519 - protein, 15 aa, synthetic construct
NKDALDLIQEAIKKA

SEQ ID NO: 7520 - protein, 15 aa, synthetic construct
MDSVFAEAIAKVRKQ

SEQ ID NO: 7521 - protein, 16 aa, synthetic construct
QYGEGLARAVQDGLKK

SEQ ID NO: 7522 - protein, 16 aa, synthetic construct
SADRASLIDDAFALAR

SEQ ID NO: 7523 - protein, 16 aa, synthetic construct
PDSKTKLALDIIKGLE

SEQ ID NO: 7524 - protein, 16 aa, synthetic construct
PKTVAEMIDAFSRARD

SEQ ID NO: 7525 - protein, 16 aa, synthetic construct
SVNLLKSHLEELAKKQ

SEQ ID NO: 7526 - protein, 16 aa, synthetic construct
RKAVAHINSVWKDLLE

SEQ ID NO: 7527 - protein, 16 aa, synthetic construct
PETYGRLSVLLKRAAE

SEQ ID NO: 7528 - protein, 16 aa, synthetic construct
REAIAASIHDVVKEVQ

SEQ ID NO: 7529 - protein, 16 aa, synthetic construct
LADAQYLHELLTRKNI

SEQ ID NO: 7530 - protein, 16 aa, synthetic construct
KQALIDSVYARETNRI

SEQ ID NO: 7531 - protein, 16 aa, synthetic construct
PYTLDVIRKDLKKQLL

SEQ ID NO: 7532 - protein, 16 aa, synthetic construct
EKERLFNNLAHLGNIL

SEQ ID NO: 7533 - protein, 16 aa, synthetic construct
EGAQQRMAQEVLTHLK

SEQ ID NO: 7534 - protein, 16 aa, synthetic construct
KQELDAALKKAKELAS

SEQ ID NO: 7535 - protein, 16 aa, synthetic construct
REAIEGWKKITDGVHS

SEQ ID NO: 7536 - protein, 16 aa, synthetic construct
SVLDEAVRVRLSRNVD

SEQ ID NO: 7537 - protein, 16 aa, synthetic construct
PKEMKEFLDEHQKMTS

SEQ ID NO: 7538 - protein, 16 aa, synthetic construct
DEQVRGWNNVTKAVHA

SEQ ID NO: 7539 - protein, 16 aa, synthetic construct
KQEMVDIIETVYRGAR

SEQ ID NO: 7540 - protein, 16 aa, synthetic construct
AERLRDKILASEASFA

SEQ ID NO: 7541 - protein, 16 aa, synthetic construct
AQAKADVLDQIKLALD

SEQ ID NO: 7542 - protein, 16 aa, synthetic construct
PADIVKNLKDNMTILE

SEQ ID NO: 7543 - protein, 16 aa, synthetic construct
LQELDIKIRKILSDKY

SEQ ID NO: 7544 - protein, 16 aa, synthetic construct
PSLVKKINNIREARYE

SEQ ID NO: 7545 - protein, 16 aa, synthetic construct
GELAKHAVSEGTRAVT

SEQ ID NO: 7546 - protein, 16 aa, synthetic construct
EDLKQLKSALYTLLET

SEQ ID NO: 7547 - protein, 16 aa, synthetic construct
ESEKVNEIVKAVKTAL

SEQ ID NO: 7548 - protein, 16 aa, synthetic construct
VEEAVRIVKEVTEKLS

SEQ ID NO: 7549 - protein, 16 aa, synthetic construct
AAENKLNDSLIQELKK

SEQ ID NO: 7550 - protein, 16 aa, synthetic construct
AGTLDWIKESSALAKK

SEQ ID NO: 7551 - protein, 16 aa, synthetic construct
YKDLEGKVKSVLESNR

SEQ ID NO: 7552 - protein, 16 aa, synthetic construct
SDVKQELIKYGKKLVE

SEQ ID NO: 7553 - protein, 16 aa, synthetic construct
ENLVREQIVRVLLERV

SEQ ID NO: 7554 - protein, 16 aa, synthetic construct
KTSHEELAKKLTQVEK

SEQ ID NO: 7555 - protein, 16 aa, synthetic construct
HKEVTTIVEAIKALAN

SEQ ID NO: 7556 - protein, 16 aa, synthetic construct
NQAKELERLIDKAMKK

SEQ ID NO: 7557 - protein, 16 aa, synthetic construct
KLTEKAIGDVFSLLEK

SEQ ID NO: 7558 - protein, 16 aa, synthetic construct
KESVEAMIIAGKSANE

SEQ ID NO: 7559 - protein, 16 aa, synthetic construct
AKELIEKSVALSKAVK

SEQ ID NO: 7560 - protein, 16 aa, synthetic construct
AKIKTIGIEARKDMQE

SEQ ID NO: 7561 - protein, 16 aa, synthetic construct
NEVIDKMRAVQEQVAS

SEQ ID NO: 7562 - protein, 16 aa, synthetic construct
TEKSKELAEIVVQAFL

SEQ ID NO: 7563 - protein, 16 aa, synthetic construct
GPVKEKILSVIKEWGT

SEQ ID NO: 7564 - protein, 16 aa, synthetic construct
VAKDSEAIIKNVIDKY

SEQ ID NO: 7565 - protein, 16 aa, synthetic construct
EVYQILEKGAAKRTTA

SEQ ID NO: 7566 - protein, 16 aa, synthetic construct
QEHRVMLVNSMNTVKE

SEQ ID NO: 7567 - protein, 16 aa, synthetic construct
GESERAVRQVFQRAKN

SEQ ID NO: 7568 - protein, 16 aa, synthetic construct
QNTLDHTSERIARIRV

SEQ ID NO: 7569 - protein, 16 aa, synthetic construct
PLGSKIASAREVIKRD

SEQ ID NO: 7570 - protein, 16 aa, synthetic construct
KVEIQVLEDIYNSLNK

SEQ ID NO: 7571 - protein, 16 aa, synthetic construct
QKRESIVQAAIAEFGD

SEQ ID NO: 7572 - protein, 16 aa, synthetic construct
LDVAAEKIDRFMQAVT

SEQ ID NO: 7573 - protein, 16 aa, synthetic construct
TGDRLNFGLAAEKARR

SEQ ID NO: 7574 - protein, 16 aa, synthetic construct
KPKNLDASITSIIHEI

SEQ ID NO: 7575 - protein, 16 aa, synthetic construct
EDFKVDAQRDIMQRTG

SEQ ID NO: 7576 - protein, 16 aa, synthetic construct
VDVAESLAIERAKSLF

SEQ ID NO: 7577 - protein, 16 aa, synthetic construct
HETALRVTAERAMNTR

SEQ ID NO: 7578 - protein, 16 aa, synthetic construct
QTTKEVLEAKVKGLIR

SEQ ID NO: 7579 - protein, 16 aa, synthetic construct
LDEILKAFKEAHSTVL

SEQ ID NO: 7580 - protein, 16 aa, synthetic construct
SSALDQAAQLRTRLEK

SEQ ID NO: 7581 - protein, 16 aa, synthetic construct
PKTALKIVDTIRKDIL

SEQ ID NO: 7582 - protein, 16 aa, synthetic construct
VRTWLKDAKQVLPEAL

SEQ ID NO: 7583 - protein, 16 aa, synthetic construct
IDEVRNALIRGFSETL

SEQ ID NO: 7584 - protein, 16 aa, synthetic construct
LSERVRESLKVWKNAE

SEQ ID NO: 7585 - protein, 16 aa, synthetic construct
RDDLNLVLATAAKLKA

SEQ ID NO: 7586 - protein, 16 aa, synthetic construct
KNVRDLAIKLRDAKQD

SEQ ID NO: 7587 - protein, 16 aa, synthetic construct
LHEVRNAVENANRVLS

SEQ ID NO: 7588 - protein, 16 aa, synthetic construct
KTIQEVIEALKPLFEK

SEQ ID NO: 7589 - protein, 16 aa, synthetic construct
ESQYKEMEAKVSSTLS

SEQ ID NO: 7590 - protein, 16 aa, synthetic construct
ADRLKAWTEALIRDVN

SEQ ID NO: 7591 - protein, 16 aa, synthetic construct
KEEALELINGYIQKIK

SEQ ID NO: 7592 - protein, 16 aa, synthetic construct
KFENMGAQMVREVASR

SEQ ID NO: 7593 - protein, 16 aa, synthetic construct
SMSVEAAKNARELLLK

SEQ ID NO: 7594 - protein, 16 aa, synthetic construct
RAEAEAEVQRSVERFK

SEQ ID NO: 7595 - protein, 16 aa, synthetic construct
ADDTLALARARGEAMS

SEQ ID NO: 7596 - protein, 16 aa, synthetic construct
PDELARRAAQVIADRT

SEQ ID NO: 7597 - protein, 16 aa, synthetic construct
GRAVNHIKSVWKDLLE

SEQ ID NO: 7598 - protein, 16 aa, synthetic construct
ITKLRTDLRFIAELTI

SEQ ID NO: 7599 - protein, 16 aa, synthetic construct
EVRNIVDKTASFVARN

SEQ ID NO: 7600 - protein, 16 aa, synthetic construct
VELIHKAFIKGIKNAT

SEQ ID NO: 7601 - protein, 16 aa, synthetic construct
REKALELAMAQIDKNF

SEQ ID NO: 7602 - protein, 16 aa, synthetic construct
LVDQEMNNVYERVMKL

SEQ ID NO: 7603 - protein, 16 aa, synthetic construct
NSIKDKFEQALIDRVK

SEQ ID NO: 7604 - protein, 16 aa, synthetic construct
RQHQEKVIGYINSAEQ

SEQ ID NO: 7605 - protein, 16 aa, synthetic construct
EKNLAYARKVKAALET

SEQ ID NO: 7606 - protein, 16 aa, synthetic construct
KELYEHVKQLIALRKQ

SEQ ID NO: 7607 - protein, 16 aa, synthetic construct
RHQMTDLLSMDALYRQ

SEQ ID NO: 7608 - protein, 16 aa, synthetic construct
VVDMEQIMTEKLARQV

SEQ ID NO: 7609 - protein, 16 aa, synthetic construct
AFIRASRALTDKVTDL

SEQ ID NO: 7610 - protein, 16 aa, synthetic construct
MRKVKSVVLFHHSELL

SEQ ID NO: 7611 - protein, 16 aa, synthetic construct
PKAVEITSYIRKVLEE

SEQ ID NO: 7612 - protein, 16 aa, synthetic construct
LAENADKLGIILRNEL

SEQ ID NO: 7613 - protein, 16 aa, synthetic construct
GEAVLDHALTLKKGEN

SEQ ID NO: 7614 - protein, 16 aa, synthetic construct
LGDVLEREASAQQRLG

SEQ ID NO: 7615 - protein, 16 aa, synthetic construct
VESMNKELKKIIGQVR

SEQ ID NO: 7616 - protein, 16 aa, synthetic construct
AEERKATILASLARYL

SEQ ID NO: 7617 - protein, 16 aa, synthetic construct
TDLMNFLKTVRSTTEK

SEQ ID NO: 7618 - protein, 16 aa, synthetic construct
TRDSGLVIKTLVDLFR

SEQ ID NO: 7619 - protein, 16 aa, synthetic construct
LEDLVRLVEAKISRTL

SEQ ID NO: 7620 - protein, 16 aa, synthetic construct
QVHVIREVASMAKEKL

SEQ ID NO: 7621 - protein, 16 aa, synthetic construct
KTNLMAELEKMNKIIQ

SEQ ID NO: 7622 - protein, 16 aa, synthetic construct
LNKAVRETAHETISAI

SEQ ID NO: 7623 - protein, 16 aa, synthetic construct
TNHSIVREYIVQSLRD

SEQ ID NO: 7624 - protein, 16 aa, synthetic construct
RERFLNARDTLRALLD

SEQ ID NO: 7625 - protein, 16 aa, synthetic construct
RTLETSVKDALARANA

SEQ ID NO: 7626 - protein, 16 aa, synthetic construct
DQQARLKLEEIAADIK

SEQ ID NO: 7627 - protein, 16 aa, synthetic construct
EPWAQRVEAAVQRVLD

SEQ ID NO: 7628 - protein, 16 aa, synthetic construct
DEKQKVAVEVIKNLLT

SEQ ID NO: 7629 - protein, 16 aa, synthetic construct
VGELNTRLTDDVSKIN

SEQ ID NO: 7630 - protein, 16 aa, synthetic construct
DTEKRDFVRTVLILKE

SEQ ID NO: 7631 - protein, 16 aa, synthetic construct
ERNLDLKSTIKTIITS

SEQ ID NO: 7632 - protein, 16 aa, synthetic construct
MAKLNQELEGKVADSL

SEQ ID NO: 7633 - protein, 16 aa, synthetic construct
DVVKNDARATASAYLE

SEQ ID NO: 7634 - protein, 16 aa, synthetic construct
AADLKAVQDKLKTFVE

SEQ ID NO: 7635 - protein, 16 aa, synthetic construct
ITLEQAKKLEKRLNEV

SEQ ID NO: 7636 - protein, 16 aa, synthetic construct
LSEIIVDFHDKIKSIS

SEQ ID NO: 7637 - protein, 16 aa, synthetic construct
HKLDAQLTQVLERAQN

SEQ ID NO: 7638 - protein, 16 aa, synthetic construct
SAANKDAIRKQMDAAA

SEQ ID NO: 7639 - protein, 16 aa, synthetic construct
KESAIKVLEKAIKAYQ

SEQ ID NO: 7640 - protein, 16 aa, synthetic construct
DKALKTMVEGLRQVAT

SEQ ID NO: 7641 - protein, 16 aa, synthetic construct
REGKTDLLRIVEKWKT

SEQ ID NO: 7642 - protein, 16 aa, synthetic construct
VKETDRIAAMVDGLQK

SEQ ID NO: 7643 - protein, 16 aa, synthetic construct
SRADAAVTDDARGLLA

SEQ ID NO: 7644 - protein, 16 aa, synthetic construct
PYSVRAKDLAEKLSNE

SEQ ID NO: 7645 - protein, 16 aa, synthetic construct
KELVDQYKAAQEAARV

SEQ ID NO: 7646 - protein, 16 aa, synthetic construct
ESDWKIARQIGPTLKE

SEQ ID NO: 7647 - protein, 16 aa, synthetic construct
LKLKEINVVNEITKIL

SEQ ID NO: 7648 - protein, 16 aa, synthetic construct
DELRDKVNGALKTLRE

SEQ ID NO: 7649 - protein, 16 aa, synthetic construct
PAFIVEESIKAQRKLL

SEQ ID NO: 7650 - protein, 16 aa, synthetic construct
TELKHTLESEGRELVK

SEQ ID NO: 7651 - protein, 16 aa, synthetic construct
HEYHAETIKNVRTATE

SEQ ID NO: 7652 - protein, 16 aa, synthetic construct
GTEANEAALKFARAHT

SEQ ID NO: 7653 - protein, 16 aa, synthetic construct
ISTLDFEIRHQLTKIH

SEQ ID NO: 7654 - protein, 16 aa, synthetic construct
PKFREAVKAASDELSK

SEQ ID NO: 7655 - protein, 16 aa, synthetic construct
EISKAVDVYNSLKDRL

SEQ ID NO: 7656 - protein, 16 aa, synthetic construct
FRQAHTASGKAVHLAE

SEQ ID NO: 7657 - protein, 16 aa, synthetic construct
ASQREAAERAMRQRDR

SEQ ID NO: 7658 - protein, 16 aa, synthetic construct
PDQIGAKGVETADKVL

SEQ ID NO: 7659 - protein, 16 aa, synthetic construct
SEGLARIDAYLKNEIQ

SEQ ID NO: 7660 - protein, 16 aa, synthetic construct
NTVNVHIHRIREKLEK

SEQ ID NO: 7661 - protein, 16 aa, synthetic construct
GQVGRQLKIIGDDINR

SEQ ID NO: 7662 - protein, 16 aa, synthetic construct
WDVIRDKTKTKIESLK

SEQ ID NO: 7663 - protein, 16 aa, synthetic construct
KSRLIDRASQLLEVIR

SEQ ID NO: 7664 - protein, 16 aa, synthetic construct
PTAKAELVKLIKAMQE

SEQ ID NO: 7665 - protein, 16 aa, synthetic construct
RDANERVAEFIRNKIR

SEQ ID NO: 7666 - protein, 16 aa, synthetic construct
RLHTVMERLMDKISFS

SEQ ID NO: 7667 - protein, 16 aa, synthetic construct
PYSKQHTITLARELAK

SEQ ID NO: 7668 - protein, 16 aa, synthetic construct
KLSLNVVRKLIELLKE

SEQ ID NO: 7669 - protein, 16 aa, synthetic construct
PQDRAALLARVDQLAR

SEQ ID NO: 7670 - protein, 16 aa, synthetic construct
LESALAMLADAQQRKD

SEQ ID NO: 7671 - protein, 16 aa, synthetic construct
NEDLKKLEASAIELAK

SEQ ID NO: 7672 - protein, 16 aa, synthetic construct
IFALAQEINELAEKAR

SEQ ID NO: 7673 - protein, 16 aa, synthetic construct
EQAVLAQRIVDKIWRD

SEQ ID NO: 7674 - protein, 16 aa, synthetic construct
PLGQALRAIGDEFETR

SEQ ID NO: 7675 - protein, 16 aa, synthetic construct
SETVDRAFGQMKAAIR

SEQ ID NO: 7676 - protein, 16 aa, synthetic construct
FRDLALRVDQIRDQMA

SEQ ID NO: 7677 - protein, 16 aa, synthetic construct
SAVQIKRELNHLLYQR

SEQ ID NO: 7678 - protein, 16 aa, synthetic construct
AEVKETLALAEAAANK

SEQ ID NO: 7679 - protein, 16 aa, synthetic construct
KKDDEVFRTAVGDLNQ

SEQ ID NO: 7680 - protein, 16 aa, synthetic construct
DAEVNRAKAQLKAALL

SEQ ID NO: 7681 - protein, 16 aa, synthetic construct
KSEREDLIKYLKQATS

SEQ ID NO: 7682 - protein, 16 aa, synthetic construct
PKGQMALKFKELVEQR

SEQ ID NO: 7683 - protein, 16 aa, synthetic construct
PEQALNDAVKIMKEKI

SEQ ID NO: 7684 - protein, 16 aa, synthetic construct
SKNVSDMIDKVHEEMK

SEQ ID NO: 7685 - protein, 16 aa, synthetic construct
ADAVFAEVHRANLSKA

SEQ ID NO: 7686 - protein, 16 aa, synthetic construct
QLSKSMDAVAESIYEK

SEQ ID NO: 7687 - protein, 16 aa, synthetic construct
FDTALNTVIDAIDKIR

SEQ ID NO: 7688 - protein, 16 aa, synthetic construct
EQGVMKAFEAALKDTA

SEQ ID NO: 7689 - protein, 16 aa, synthetic construct
PVEVAERIRTVVAAET

SEQ ID NO: 7690 - protein, 16 aa, synthetic construct
GDAKLAEAKAAARQNL

SEQ ID NO: 7691 - protein, 16 aa, synthetic construct
SGKFVNGILDRIAKEH

SEQ ID NO: 7692 - protein, 16 aa, synthetic construct
QRAFVKNVDAIERAKG

SEQ ID NO: 7693 - protein, 16 aa, synthetic construct
SRVEQVLADLKNFSKE

SEQ ID NO: 7694 - protein, 16 aa, synthetic construct
KTQIYAVKDKIETLLI

SEQ ID NO: 7695 - protein, 16 aa, synthetic construct
DRQNKAYKEAMEALKE

SEQ ID NO: 7696 - protein, 16 aa, synthetic construct
NEAADLIEKAINMAIR

SEQ ID NO: 7697 - protein, 16 aa, synthetic construct
VAARSDLLVDQWKKKA

SEQ ID NO: 7698 - protein, 16 aa, synthetic construct
VREVFEMATRAALQAR

SEQ ID NO: 7699 - protein, 16 aa, synthetic construct
ENDLQRATDLAYRMVS

SEQ ID NO: 7700 - protein, 16 aa, synthetic construct
HEKLTQARNQLLAEAA

SEQ ID NO: 7701 - protein, 16 aa, synthetic construct
LGHQVASDYLRIMERA

SEQ ID NO: 7702 - protein, 16 aa, synthetic construct
RDKILSDVLAKFSAAI

SEQ ID NO: 7703 - protein, 16 aa, synthetic construct
DIHQIIDSIQETKKLK

SEQ ID NO: 7704 - protein, 16 aa, synthetic construct
RDIINARLREELDKIT

SEQ ID NO: 7705 - protein, 16 aa, synthetic construct
IGKITRTVSDYVQEAR

SEQ ID NO: 7706 - protein, 16 aa, synthetic construct
ENVHARIEGFKSALDV

SEQ ID NO: 7707 - protein, 16 aa, synthetic construct
KQAVSMFLGAVEEAKK

SEQ ID NO: 7708 - protein, 16 aa, synthetic construct
PDEMRKEVLMQLLNVK

SEQ ID NO: 7709 - protein, 16 aa, synthetic construct
HREAVEHFLEALNMQR

SEQ ID NO: 7710 - protein, 16 aa, synthetic construct
RVPEQKLGAAIDEFAS

SEQ ID NO: 7711 - protein, 16 aa, synthetic construct
GDQADRYAVKLLNHLR

SEQ ID NO: 7712 - protein, 16 aa, synthetic construct
ISYVQGERQARNVLRE

SEQ ID NO: 7713 - protein, 16 aa, synthetic construct
DKFLQDKKLLISILEK

SEQ ID NO: 7714 - protein, 16 aa, synthetic construct
AEGQAYRDNVARIIKN

SEQ ID NO: 7715 - protein, 16 aa, synthetic construct
EGDLFTQLRKIVKMAS

SEQ ID NO: 7716 - protein, 16 aa, synthetic construct
LDELVKETKKKIIDTL

SEQ ID NO: 7717 - protein, 16 aa, synthetic construct
PATVVTALEQLAHHHH

SEQ ID NO: 7718 - protein, 16 aa, synthetic construct
AREMANAKEIARTVQI

SEQ ID NO: 7719 - protein, 16 aa, synthetic construct
VELGRQLGAAYQRLDD

SEQ ID NO: 7720 - protein, 16 aa, synthetic construct
RDELKALIQKVTHNLV

SEQ ID NO: 7721 - protein, 16 aa, synthetic construct
RSELSDLGTLIKDNLK

SEQ ID NO: 7722 - protein, 16 aa, synthetic construct
VQDLGSTVIKEVLKRA

SEQ ID NO: 7723 - protein, 16 aa, synthetic construct
IIPRTLHQIFEKLTDN

SEQ ID NO: 7724 - protein, 16 aa, synthetic construct
TNELKEIVRKIGKDLS

SEQ ID NO: 7725 - protein, 16 aa, synthetic construct
PTIRERIEAMTAEASK

SEQ ID NO: 7726 - protein, 16 aa, synthetic construct
QEARLGIKPHIQRLLD

SEQ ID NO: 7727 - protein, 16 aa, synthetic construct
TADRDILARLHKAVTS

SEQ ID NO: 7728 - protein, 16 aa, synthetic construct
DGELNLMKKAASITSE

SEQ ID NO: 7729 - protein, 16 aa, synthetic construct
TDAINRGNERLLRYLQ

SEQ ID NO: 7730 - protein, 16 aa, synthetic construct
REKALELAVAQIEKSY

SEQ ID NO: 7731 - protein, 16 aa, synthetic construct
GDVKVWMQNLEDLHTR

SEQ ID NO: 7732 - protein, 16 aa, synthetic construct
ENFTQRVSTNLEKMKQ

SEQ ID NO: 7733 - protein, 16 aa, synthetic construct
HAAGDRMLQEVATRLS

SEQ ID NO: 7734 - protein, 16 aa, synthetic construct
KTDRIKLEQVISGALK

SEQ ID NO: 7735 - protein, 16 aa, synthetic construct
EKSREFAEKLNREARD

SEQ ID NO: 7736 - protein, 16 aa, synthetic construct
SANTKRVMDIFLKINE

SEQ ID NO: 7737 - protein, 16 aa, synthetic construct
RQELELSVKKELEKIL

SEQ ID NO: 7738 - protein, 16 aa, synthetic construct
SEHLAKMLSKHLERVI

SEQ ID NO: 7739 - protein, 16 aa, synthetic construct
VFETLKEVSRLVLARV

SEQ ID NO: 7740 - protein, 16 aa, synthetic construct
DSVKIEAAKLKKSFLT

SEQ ID NO: 7741 - protein, 16 aa, synthetic construct
PTARERTTGAVDALKA

SEQ ID NO: 7742 - protein, 16 aa, synthetic construct
FKQLVEDLDRILTLTT

SEQ ID NO: 7743 - protein, 16 aa, synthetic construct
TGAMITGTMVDELERR

SEQ ID NO: 7744 - protein, 16 aa, synthetic construct
ETVLESYRTNSLRKIN

SEQ ID NO: 7745 - protein, 16 aa, synthetic construct
DLEKAKTHLVVLWASQ

SEQ ID NO: 7746 - protein, 16 aa, synthetic construct
KRTLNRYEKIANDIDA

SEQ ID NO: 7747 - protein, 16 aa, synthetic construct
DKAAFAAQKQKADALL

SEQ ID NO: 7748 - protein, 16 aa, synthetic construct
QALKDYEAHLASLGRS

SEQ ID NO: 7749 - protein, 16 aa, synthetic construct
PKTVNEMIDAFTKARD

SEQ ID NO: 7750 - protein, 16 aa, synthetic construct
AGLSEKVDRLHSYLNR

SEQ ID NO: 7751 - protein, 16 aa, synthetic construct
HQGVAIDTFAKEVEKR

SEQ ID NO: 7752 - protein, 16 aa, synthetic construct
VEKSVETLLDLIMKRM

SEQ ID NO: 7753 - protein, 16 aa, synthetic construct
PKEIQIQIRKFVGELI

SEQ ID NO: 7754 - protein, 16 aa, synthetic construct
DDVKKLAEETEARIKS

SEQ ID NO: 7755 - protein, 16 aa, synthetic construct
DDLMEAAAKRFKEQVS

SEQ ID NO: 7756 - protein, 16 aa, synthetic construct
MRNHAKTDRVFDLAAR

SEQ ID NO: 7757 - protein, 16 aa, synthetic construct
ARHMRELLTQMGHLYG

SEQ ID NO: 7758 - protein, 16 aa, synthetic construct
PYNSRADELARLAIKE

SEQ ID NO: 7759 - protein, 16 aa, synthetic construct
TDLIKRIGQATAKEVA

SEQ ID NO: 7760 - protein, 16 aa, synthetic construct
PYGRDRDGQVAAALKT

SEQ ID NO: 7761 - protein, 16 aa, synthetic construct
KELVLRILTVRENLAE

SEQ ID NO: 7762 - protein, 16 aa, synthetic construct
KNTADQVAVEAMRERM

SEQ ID NO: 7763 - protein, 16 aa, synthetic construct
AKGQQEAARAGELLKE

SEQ ID NO: 7764 - protein, 16 aa, synthetic construct
DVLYSLSKTLKDARDK

SEQ ID NO: 7765 - protein, 16 aa, synthetic construct
LTELNSLISRLADDTK

SEQ ID NO: 7766 - protein, 16 aa, synthetic construct
GTKVTKMEDDIKKLLG

SEQ ID NO: 7767 - protein, 16 aa, synthetic construct
GLQRAKTGTDKTLVKE

SEQ ID NO: 7768 - protein, 16 aa, synthetic construct
PEKTKAVENYLIQMAR

SEQ ID NO: 7769 - protein, 16 aa, synthetic construct
DEKTAITKGYEALIKR

SEQ ID NO: 7770 - protein, 16 aa, synthetic construct
AEVYDIIKKESNRQRV

SEQ ID NO: 7771 - protein, 16 aa, synthetic construct
AARTVRAQLREWLAEI

SEQ ID NO: 7772 - protein, 16 aa, synthetic construct
VSSIRDADRVIGLLES

SEQ ID NO: 7773 - protein, 16 aa, synthetic construct
SAEAVKKTAEDLAKEL

SEQ ID NO: 7774 - protein, 16 aa, synthetic construct
NAVSLVMRRIRKENVD

SEQ ID NO: 7775 - protein, 16 aa, synthetic construct
LSQHERYVEQLKQALK

SEQ ID NO: 7776 - protein, 16 aa, synthetic construct
EADMKRVVLSLVTMLH

SEQ ID NO: 7777 - protein, 16 aa, synthetic construct
PEAINRGNERLLRYLQ

SEQ ID NO: 7778 - protein, 16 aa, synthetic construct
EKTRDAALILAQKAHA

SEQ ID NO: 7779 - protein, 16 aa, synthetic construct
KNELVQRLIKDDEESK

SEQ ID NO: 7780 - protein, 16 aa, synthetic construct
IFERLTSELLGVMAKK

SEQ ID NO: 7781 - protein, 16 aa, synthetic construct
MEEMRKEIIAVIQKYT

SEQ ID NO: 7782 - protein, 16 aa, synthetic construct
LDDVDFINKRITVLAN

SEQ ID NO: 7783 - protein, 16 aa, synthetic construct
IATRKKWVSLVEGVKE

SEQ ID NO: 7784 - protein, 16 aa, synthetic construct
RAELDALLTQAALFKR

SEQ ID NO: 7785 - protein, 16 aa, synthetic construct
AQELDIKARNFLINKK

SEQ ID NO: 7786 - protein, 16 aa, synthetic construct
EKSILGAKEALSILNR

SEQ ID NO: 7787 - protein, 16 aa, synthetic construct
NELREALNKAFAEMRA

SEQ ID NO: 7788 - protein, 16 aa, synthetic construct
DKGFQKVIADMSGPHV

SEQ ID NO: 7789 - protein, 16 aa, synthetic construct
LSYREAVLRAVDRLNE

SEQ ID NO: 7790 - protein, 16 aa, synthetic construct
HLSGDEVLKTVSKRIL

SEQ ID NO: 7791 - protein, 16 aa, synthetic construct
TELKKITDKTIKAFMD

SEQ ID NO: 7792 - protein, 16 aa, synthetic construct
FRDLALRVDQIRDNMA

SEQ ID NO: 7793 - protein, 16 aa, synthetic construct
VQDIERAVAKLAQKLK

SEQ ID NO: 7794 - protein, 16 aa, synthetic construct
VEIGEKIAQIAIDRAS

SEQ ID NO: 7795 - protein, 16 aa, synthetic construct
AHTYIAAKKIENEAKK

SEQ ID NO: 7796 - protein, 16 aa, synthetic construct
EETLINHAKAWASAIR

SEQ ID NO: 7797 - protein, 16 aa, synthetic construct
RAERREVENVVVTALA

SEQ ID NO: 7798 - protein, 16 aa, synthetic construct
TNLTKLEVLLEISDKL

SEQ ID NO: 7799 - protein, 16 aa, synthetic construct
PEFREKALKAMETERQ

SEQ ID NO: 7800 - protein, 16 aa, synthetic construct
DAINQKAQELARKAVA

SEQ ID NO: 7801 - protein, 16 aa, synthetic construct
PRELLIARQAANVIEH

SEQ ID NO: 7802 - protein, 16 aa, synthetic construct
QEEALELINGYIQKIK

SEQ ID NO: 7803 - protein, 16 aa, synthetic construct
DERNRQIAEIGASLIK

SEQ ID NO: 7804 - protein, 16 aa, synthetic construct
LKEAMDLGTEAAKYVS

SEQ ID NO: 7805 - protein, 16 aa, synthetic construct
AHIQHDKTTSALKILS

SEQ ID NO: 7806 - protein, 16 aa, synthetic construct
ASLKEFLKSLLEAIIK

SEQ ID NO: 7807 - protein, 16 aa, synthetic construct
SETVDRAFSQMKAAIR

SEQ ID NO: 7808 - protein, 16 aa, synthetic construct
RENFEILMKLKESLEL

SEQ ID NO: 7809 - protein, 16 aa, synthetic construct
PQLAHDRITEAARQVR

SEQ ID NO: 7810 - protein, 16 aa, synthetic construct
APYRKEQRLREVLSGL

SEQ ID NO: 7811 - protein, 16 aa, synthetic construct
RQEVQDTARGQINDYI

SEQ ID NO: 7812 - protein, 16 aa, synthetic construct
MTLAKTEAKLLHEKIS

SEQ ID NO: 7813 - protein, 16 aa, synthetic construct
SDLVYETINRVKRIKD

SEQ ID NO: 7814 - protein, 16 aa, synthetic construct
RRKFEEVDTNLKVLLH

SEQ ID NO: 7815 - protein, 16 aa, synthetic construct
LDRLRQFIGELATLLD

SEQ ID NO: 7816 - protein, 16 aa, synthetic construct
VSKMNDMVKLVEKLLA

SEQ ID NO: 7817 - protein, 16 aa, synthetic construct
GGEAKAVETLKQQIQK

SEQ ID NO: 7818 - protein, 16 aa, synthetic construct
KEDVDVAVAAAKTALT

SEQ ID NO: 7819 - protein, 16 aa, synthetic construct
ATDVSKRLDLAVRLLI

SEQ ID NO: 7820 - protein, 16 aa, synthetic construct
REEAISNMVVALKELS

SEQ ID NO: 7821 - protein, 16 aa, synthetic construct
AVIEMTKKVKPHLVAS

SEQ ID NO: 7822 - protein, 16 aa, synthetic construct
AVIEMTQKTKEHLIKT

SEQ ID NO: 7823 - protein, 16 aa, synthetic construct
LSAAEHLLKAQEHLIG

SEQ ID NO: 7824 - protein, 16 aa, synthetic construct
DNDRAFTIKKLAELVK

SEQ ID NO: 7825 - protein, 16 aa, synthetic construct
KEEHTELVKDLIAKLN

SEQ ID NO: 7826 - protein, 16 aa, synthetic construct
TQHWVLEGIERAVKEA

SEQ ID NO: 7827 - protein, 16 aa, synthetic construct
GDSQDTAYKVSQLADR

SEQ ID NO: 7828 - protein, 16 aa, synthetic construct
GARLAEYHAKATEHLS

SEQ ID NO: 7829 - protein, 16 aa, synthetic construct
YKKRLNELITDALITS

SEQ ID NO: 7830 - protein, 16 aa, synthetic construct
RQEALELIKKGYTQQL

SEQ ID NO: 7831 - protein, 16 aa, synthetic construct
SVRMRAIQNRLLHELG

SEQ ID NO: 7832 - protein, 16 aa, synthetic construct
SEPLLHLREKIARLVT

SEQ ID NO: 7833 - protein, 16 aa, synthetic construct
RGHQKLINATVEKARE

SEQ ID NO: 7834 - protein, 16 aa, synthetic construct
LESSHALAHALKMMRE

SEQ ID NO: 7835 - protein, 16 aa, synthetic construct
KQTESHAVKIVVEAAR

SEQ ID NO: 7836 - protein, 16 aa, synthetic construct
PEDMLEQFKTVRALIR

SEQ ID NO: 7837 - protein, 16 aa, synthetic construct
EDDVKSLSRVMIHVFS

SEQ ID NO: 7838 - protein, 16 aa, synthetic construct
AYADVIVNSALEKLRK

SEQ ID NO: 7839 - protein, 16 aa, synthetic construct
IYEHLQKLVQAELKLI

SEQ ID NO: 7840 - protein, 16 aa, synthetic construct
KDAFLLIQRLTRIILH

SEQ ID NO: 7841 - protein, 16 aa, synthetic construct
EQGNREARQAGQLLKE

SEQ ID NO: 7842 - protein, 16 aa, synthetic construct
QATLDKLEAGFKKLQE

SEQ ID NO: 7843 - protein, 16 aa, synthetic construct
AVIYLISHKLVKKSLD

SEQ ID NO: 7844 - protein, 16 aa, synthetic construct
RVHKINNVNKALDFIA

SEQ ID NO: 7845 - protein, 16 aa, synthetic construct
FDTALTDLKTIIRAER

SEQ ID NO: 7846 - protein, 16 aa, synthetic construct
DGTQRGALVISQEAKR

SEQ ID NO: 7847 - protein, 16 aa, synthetic construct
DAQKIAIDKLFSMLKD

SEQ ID NO: 7848 - protein, 16 aa, synthetic construct
NHVNEALKALKQIKEE

SEQ ID NO: 7849 - protein, 16 aa, synthetic construct
ERDRTHSIIKGIKDRT

SEQ ID NO: 7850 - protein, 16 aa, synthetic construct
KQVGALKSMVEDKIQK

SEQ ID NO: 7851 - protein, 16 aa, synthetic construct
VYGKTKLAGEKALQDN

SEQ ID NO: 7852 - protein, 16 aa, synthetic construct
SEAANQRLEAGKSAVE

SEQ ID NO: 7853 - protein, 16 aa, synthetic construct
KEQVQASLENMAKVVD

SEQ ID NO: 7854 - protein, 16 aa, synthetic construct
QETQKGALKEIQAFIR

SEQ ID NO: 7855 - protein, 16 aa, synthetic construct
PRAKKVLELSLREGLQ

SEQ ID NO: 7856 - protein, 16 aa, synthetic construct
KLHSQANLMRLKSDLF

SEQ ID NO: 7857 - protein, 16 aa, synthetic construct
GEAYKQQVARAVAEIR

SEQ ID NO: 7858 - protein, 16 aa, synthetic construct
KEDFGKLMTKNHELLK

SEQ ID NO: 7859 - protein, 16 aa, synthetic construct
KEAASVTRDHMVMVGT

SEQ ID NO: 7860 - protein, 16 aa, synthetic construct
RTEAANVEKITTKLLK

SEQ ID NO: 7861 - protein, 16 aa, synthetic construct
VGDDFSRVVNRQLDQT

SEQ ID NO: 7862 - protein, 16 aa, synthetic construct
AGERIVDIIATDIQTK

SEQ ID NO: 7863 - protein, 16 aa, synthetic construct
VGDAISALSRKIAKET

SEQ ID NO: 7864 - protein, 16 aa, synthetic construct
RQAIFETLVAKGRELL

SEQ ID NO: 7865 - protein, 16 aa, synthetic construct
SVGAKTLKSVIKEYNE

SEQ ID NO: 7866 - protein, 16 aa, synthetic construct
IDLQKEVEALLDKQIK

SEQ ID NO: 7867 - protein, 16 aa, synthetic construct
NASDRLLEIMRLYQKQ

SEQ ID NO: 7868 - protein, 16 aa, synthetic construct
IDAAHKEITDGVANFK

SEQ ID NO: 7869 - protein, 16 aa, synthetic construct
DEWKNKLDSLIDRIIK

SEQ ID NO: 7870 - protein, 16 aa, synthetic construct
GRESVGFLVTIKELLE

SEQ ID NO: 7871 - protein, 16 aa, synthetic construct
VEKVLKTRYHDATSKL

SEQ ID NO: 7872 - protein, 16 aa, synthetic construct
PKVINRLAHEVIEAQQ

SEQ ID NO: 7873 - protein, 16 aa, synthetic construct
SLAEMGANRLWKLIHE

SEQ ID NO: 7874 - protein, 16 aa, synthetic construct
RNDYRTLRQGIIDMVL

SEQ ID NO: 7875 - protein, 16 aa, synthetic construct
VRGRLAETLLILKENF

SEQ ID NO: 7876 - protein, 16 aa, synthetic construct
LGREKAVQEAIRDLIQ

SEQ ID NO: 7877 - protein, 16 aa, synthetic construct
SPRETLTDTIMMAKIR

SEQ ID NO: 7878 - protein, 16 aa, synthetic construct
GPDNLRKGIELAVAET

SEQ ID NO: 7879 - protein, 16 aa, synthetic construct
RETLEISYRNAIARLS

SEQ ID NO: 7880 - protein, 16 aa, synthetic construct
PADWAKKLTDAVLRQK

SEQ ID NO: 7881 - protein, 16 aa, synthetic construct
ISTLDFEIRHQLTQIH

SEQ ID NO: 7882 - protein, 16 aa, synthetic construct
KTVNMMELINNIAKEH

SEQ ID NO: 7883 - protein, 16 aa, synthetic construct
QHLHTLLDLYDKINTK

SEQ ID NO: 7884 - protein, 16 aa, synthetic construct
KPQVFANAEKIVEQLK

SEQ ID NO: 7885 - protein, 16 aa, synthetic construct
PDQQRDFQREIQILKA

SEQ ID NO: 7886 - protein, 16 aa, synthetic construct
LEGLLSQMKAIDDLVK

SEQ ID NO: 7887 - protein, 16 aa, synthetic construct
FETNVRETKRVVEAAH

SEQ ID NO: 7888 - protein, 16 aa, synthetic construct
PDDTARILREFLSDAR

SEQ ID NO: 7889 - protein, 16 aa, synthetic construct
EARQRLVEAQIKEAVL

SEQ ID NO: 7890 - protein, 16 aa, synthetic construct
KTELLRAVADRILLSA

SEQ ID NO: 7891 - protein, 16 aa, synthetic construct
PDHKATRDATLLAARE

SEQ ID NO: 7892 - protein, 16 aa, synthetic construct
ISTLDFKIRHQLTQTH

SEQ ID NO: 7893 - protein, 16 aa, synthetic construct
KSKKLEFLLKVSDRLE

SEQ ID NO: 7894 - protein, 16 aa, synthetic construct
ASLVKSRLEHELGRIR

SEQ ID NO: 7895 - protein, 16 aa, synthetic construct
FVENAIIKARHAAKQT

SEQ ID NO: 7896 - protein, 16 aa, synthetic construct
LAARKDFQREAELLTN

SEQ ID NO: 7897 - protein, 16 aa, synthetic construct
NQRAAIVEKKIELAKT

SEQ ID NO: 7898 - protein, 16 aa, synthetic construct
DEAVAKFSTAINELKA

SEQ ID NO: 7899 - protein, 16 aa, synthetic construct
DSTRETVLKQIREFLE

SEQ ID NO: 7900 - protein, 16 aa, synthetic construct
EMEREQLEVLKQRGIA

SEQ ID NO: 7901 - protein, 16 aa, synthetic construct
MDERNRQIAEIGASLI

SEQ ID NO: 7902 - protein, 16 aa, synthetic construct
ALNEKLVKETLQLAEQ

SEQ ID NO: 7903 - protein, 16 aa, synthetic construct
RDELVEKVNKTLAKRL

SEQ ID NO: 7904 - protein, 16 aa, synthetic construct
KEAKNAAAKLAVEILN

SEQ ID NO: 7905 - protein, 16 aa, synthetic construct
ADAMNREVSSLKNKLR

SEQ ID NO: 7906 - protein, 16 aa, synthetic construct
HRLIDQATAEIVETAK

SEQ ID NO: 7907 - protein, 16 aa, synthetic construct
PKFKKILSLMDHVEEQ

SEQ ID NO: 7908 - protein, 16 aa, synthetic construct
QAAASEWRARVVDALK

SEQ ID NO: 7909 - protein, 16 aa, synthetic construct
TQGVKRMNGFIQAHRE

SEQ ID NO: 7910 - protein, 16 aa, synthetic construct
VANAVQKIKGIVETEH

SEQ ID NO: 7911 - protein, 16 aa, synthetic construct
MDSKKYVQLKHKAAAE

SEQ ID NO: 7912 - protein, 16 aa, synthetic construct
SKTGEKIMQLLKKLNE

SEQ ID NO: 7913 - protein, 16 aa, synthetic construct
RTELKEIVTSDLKQLL

SEQ ID NO: 7914 - protein, 16 aa, synthetic construct
GRVVLDEAVKLLKQAS

SEQ ID NO: 7915 - protein, 16 aa, synthetic construct
RELMETGRSVVQKYLN

SEQ ID NO: 7916 - protein, 16 aa, synthetic construct
QELELSLNMAFARARE

SEQ ID NO: 7917 - protein, 16 aa, synthetic construct
PQVDKVREATEIATGL

SEQ ID NO: 7918 - protein, 16 aa, synthetic construct
GHEKLTQARNQLLAEA

SEQ ID NO: 7919 - protein, 16 aa, synthetic construct
LEKTRELKEVLNKVKY

SEQ ID NO: 7920 - protein, 16 aa, synthetic construct
PLTVKKHLRAQAIALE

SEQ ID NO: 7921 - protein, 16 aa, synthetic construct
NQLQNGIKRVKEFLES

SEQ ID NO: 7922 - protein, 16 aa, synthetic construct
STVAEKSLTELLKSLH

SEQ ID NO: 7923 - protein, 16 aa, synthetic construct
DTHRRLVMETLIKAGD

SEQ ID NO: 7924 - protein, 16 aa, synthetic construct
ENVKKKLSLALEAAKM

SEQ ID NO: 7925 - protein, 16 aa, synthetic construct
ADLVKFGQRLRELRTA

SEQ ID NO: 7926 - protein, 16 aa, synthetic construct
GPKVRTWLSENGEERL

SEQ ID NO: 7927 - protein, 16 aa, synthetic construct
SIIRDLTDAAVKMVRV

SEQ ID NO: 7928 - protein, 16 aa, synthetic construct
REAAVEQLKSIREDIV

SEQ ID NO: 7929 - protein, 17 aa, synthetic construct
AKGQQEAARAGELLKEK

SEQ ID NO: 7930 - protein, 17 aa, synthetic construct
DEHAVEAVRGGQYILQR

SEQ ID NO: 7931 - protein, 17 aa, synthetic construct
RDAGQLYSKGMESLKVM

SEQ ID NO: 7932 - protein, 17 aa, synthetic construct
TAIIDQILKLRLEKAKL

SEQ ID NO: 7933 - protein, 17 aa, synthetic construct
FETVRSAAKTIREALDA

SEQ ID NO: 7934 - protein, 17 aa, synthetic construct
LAEAQADFLTRVLQRLE

SEQ ID NO: 7935 - protein, 17 aa, synthetic construct
SAAIREMLGHFSDANQK

SEQ ID NO: 7936 - protein, 17 aa, synthetic construct
RTGTFIVIDILIDIIRE

SEQ ID NO: 7937 - protein, 17 aa, synthetic construct
NETRKSLIAGHMTEIMQ

SEQ ID NO: 7938 - protein, 17 aa, synthetic construct
SGERDRTHSIIKGIKDR

SEQ ID NO: 7939 - protein, 17 aa, synthetic construct
FKQLVEALDKVLLAVSE

SEQ ID NO: 7940 - protein, 17 aa, synthetic construct
SEVDIQGSMAYAKALEK

SEQ ID NO: 7941 - protein, 17 aa, synthetic construct
SLLKRTWEQAVKGLNES

SEQ ID NO: 7942 - protein, 17 aa, synthetic construct
PVDQATLTAFRDMRAAH

SEQ ID NO: 7943 - protein, 17 aa, synthetic construct
ASERGRLLNRLADLIER

SEQ ID NO: 7944 - protein, 17 aa, synthetic construct
DREKALELAVAQIEKSY

SEQ ID NO: 7945 - protein, 17 aa, synthetic construct
PDREKALELAVAQIEKS

SEQ ID NO: 7946 - protein, 17 aa, synthetic construct
GETKTKYDAMKKDNVES

SEQ ID NO: 7947 - protein, 17 aa, synthetic construct
KAELQKAAQDAKAAYEA

SEQ ID NO: 7948 - protein, 17 aa, synthetic construct
LEAVMDAIRTTVTHWVK

SEQ ID NO: 7949 - protein, 17 aa, synthetic construct
VKETVEAMRVVEATLSA

SEQ ID NO: 7950 - protein, 17 aa, synthetic construct
VSTNVTTAERLVRAAHK

SEQ ID NO: 7951 - protein, 17 aa, synthetic construct
ATLEAEYNLERAQKAVN

SEQ ID NO: 7952 - protein, 17 aa, synthetic construct
AAQVKDALTKMRAAALD

SEQ ID NO: 7953 - protein, 17 aa, synthetic construct
ASDKLWVTRVIAHELAH

SEQ ID NO: 7954 - protein, 17 aa, synthetic construct
AEKLFNQDVDAAVRGIL

SEQ ID NO: 7955 - protein, 17 aa, synthetic construct
IQEHINRLVAIRAQADI

SEQ ID NO: 7956 - protein, 17 aa, synthetic construct
KAESDAAYERQARKILE

SEQ ID NO: 7957 - protein, 17 aa, synthetic construct
GTDLMNFLKTVRSTTEK

SEQ ID NO: 7958 - protein, 17 aa, synthetic construct
NDEMKAVADAYKQVLKD

SEQ ID NO: 7959 - protein, 17 aa, synthetic construct
KESVEAMIIAGKSANEH

SEQ ID NO: 7960 - protein, 17 aa, synthetic construct
WDKTGDILAEAALGLQR

SEQ ID NO: 7961 - protein, 17 aa, synthetic construct
SAARERGEGFQQAVAAH

SEQ ID NO: 7962 - protein, 17 aa, synthetic construct
AKEALEQARQNVEKTAE

SEQ ID NO: 7963 - protein, 17 aa, synthetic construct
MLAYSEMIAEKVRTAAR

SEQ ID NO: 7964 - protein, 17 aa, synthetic construct
HEYHAETIKNVRTATES

SEQ ID NO: 7965 - protein, 17 aa, synthetic construct
RETVRVMAEVSALEATA

SEQ ID NO: 7966 - protein, 17 aa, synthetic construct
TTELTMIANRIRELMEA

SEQ ID NO: 7967 - protein, 17 aa, synthetic construct
RGKVERSIKIVDEYLSA

SEQ ID NO: 7968 - protein, 17 aa, synthetic construct
AKEIAQLVQDYTQHNGR

SEQ ID NO: 7969 - protein, 17 aa, synthetic construct
GPDGDAVVSLAKEYSKT

SEQ ID NO: 7970 - protein, 17 aa, synthetic construct
VAALIAERERVTTSLND

SEQ ID NO: 7971 - protein, 17 aa, synthetic construct
LHLVDLARFAVTEHNKK

SEQ ID NO: 7972 - protein, 17 aa, synthetic construct
SAARERGEGFKQAIEAH

SEQ ID NO: 7973 - protein, 17 aa, synthetic construct
REQVVVRLLDMLTKAAS

SEQ ID NO: 7974 - protein, 17 aa, synthetic construct
QAVVQKSLAAIADDSKK

SEQ ID NO: 7975 - protein, 17 aa, synthetic construct
MDERNRQIAEIGASLIK

SEQ ID NO: 7976 - protein, 17 aa, synthetic construct
RHVDYVADQIVTKLVDV

SEQ ID NO: 7977 - protein, 17 aa, synthetic construct
AVDQRRAARTGMAFEML

SEQ ID NO: 7978 - protein, 17 aa, synthetic construct
AVLDDWLKQKGLKNQAL

SEQ ID NO: 7979 - protein, 17 aa, synthetic construct
QQLVTDIIHLARVARDS

SEQ ID NO: 7980 - protein, 17 aa, synthetic construct
NAVSLVMRRIRKENVDA

SEQ ID NO: 7981 - protein, 17 aa, synthetic construct
RELTEKAFSLVKLALRD

SEQ ID NO: 7982 - protein, 17 aa, synthetic construct
KDSLGETAFNMLLDRIV

SEQ ID NO: 7983 - protein, 17 aa, synthetic construct
LEKNFQAAKNMIERAGE

SEQ ID NO: 7984 - protein, 17 aa, synthetic construct
ANLTATYRKLEEMAKQV

SEQ ID NO: 7985 - protein, 17 aa, synthetic construct
DSGIKRIAEAAWQVNES

SEQ ID NO: 7986 - protein, 17 aa, synthetic construct
AAERGRVLMRLSARVTD

SEQ ID NO: 7987 - protein, 17 aa, synthetic construct
KPQLDKVLGFVAQAKKE

SEQ ID NO: 7988 - protein, 17 aa, synthetic construct
DKDRANLINNIFELAGL

SEQ ID NO: 7989 - protein, 17 aa, synthetic construct
PLAIHALLERMNEQKAK

SEQ ID NO: 7990 - protein, 17 aa, synthetic construct
QWVKDAMQHLDRQAAAL

SEQ ID NO: 7991 - protein, 17 aa, synthetic construct
ARHRELAAGIEAWATQH

SEQ ID NO: 7992 - protein, 17 aa, synthetic construct
STNESVKNLLLERVKES

SEQ ID NO: 7993 - protein, 17 aa, synthetic construct
RNNMQHVAGITEAAKET

SEQ ID NO: 7994 - protein, 17 aa, synthetic construct
EEHFKVLVKMTAQELAN

SEQ ID NO: 7995 - protein, 17 aa, synthetic construct
SAERIRQLKTVLGKMQE

SEQ ID NO: 7996 - protein, 17 aa, synthetic construct
ETLKLETAKAILHGFQT

SEQ ID NO: 7997 - protein, 17 aa, synthetic construct
LSLLMKNADTAMYHAKE

SEQ ID NO: 7998 - protein, 17 aa, synthetic construct
YADVELNSRKVAAGLHK

SEQ ID NO: 7999 - protein, 17 aa, synthetic construct
ETDEYQLLQVKKLIALS

SEQ ID NO: 8000 - protein, 17 aa, synthetic construct
VVLAEKAQQIAKILVKE

SEQ ID NO: 8001 - protein, 17 aa, synthetic construct
ESLVMAGDLVIKTAKKH

SEQ ID NO: 8002 - protein, 17 aa, synthetic construct
KEGVYGLARTLLHLAQE

SEQ ID NO: 8003 - protein, 17 aa, synthetic construct
VQDRAALIHKIADGIQA

SEQ ID NO: 8004 - protein, 17 aa, synthetic construct
EASIAISQARLDEKIAQ

SEQ ID NO: 8005 - protein, 17 aa, synthetic construct
KEQKAELVLNALVAIRY

SEQ ID NO: 8006 - protein, 17 aa, synthetic construct
PLEEKTIRAVARAHHET

SEQ ID NO: 8007 - protein, 17 aa, synthetic construct
ADMRSQRAQLAKGVFDR

SEQ ID NO: 8008 - protein, 17 aa, synthetic construct
TDLRIAFIAEVRKVANE

SEQ ID NO: 8009 - protein, 17 aa, synthetic construct
GKQASEVFAVLINKDKA

SEQ ID NO: 8010 - protein, 17 aa, synthetic construct
NQVLNKVKADKSLEANN

SEQ ID NO: 8011 - protein, 17 aa, synthetic construct
LAQVREEVTAKYAELKA

SEQ ID NO: 8012 - protein, 17 aa, synthetic construct
VEEKTELFNVVVSLIRA

SEQ ID NO: 8013 - protein, 17 aa, synthetic construct
MDELNRQIAEIGASLIK

SEQ ID NO: 8014 - protein, 17 aa, synthetic construct
HEYHQTTINNVRQAAAE

SEQ ID NO: 8015 - protein, 17 aa, synthetic construct
GERIKKIVNDILGGKNA

SEQ ID NO: 8016 - protein, 17 aa, synthetic construct
LEPFLAQMKALDDLIKS

SEQ ID NO: 8017 - protein, 17 aa, synthetic construct
MKQTESHAVKIVVEAAR

SEQ ID NO: 8018 - protein, 17 aa, synthetic construct
DFITSKLLSGAEDALLR

SEQ ID NO: 8019 - protein, 17 aa, synthetic construct
TDLRLAFTALIREALNK

SEQ ID NO: 8020 - protein, 17 aa, synthetic construct
PKVINRLAHEVIEAQQA

SEQ ID NO: 8021 - protein, 17 aa, synthetic construct
FETNVRETRRVVEAAHA

SEQ ID NO: 8022 - protein, 17 aa, synthetic construct
EELAIQNARLAISIARK

SEQ ID NO: 8023 - protein, 17 aa, synthetic construct
EQGNREARQAGQLLKEA

SEQ ID NO: 8024 - protein, 17 aa, synthetic construct
GTKVTKMEDDIKKLLGR

SEQ ID NO: 8025 - protein, 17 aa, synthetic construct
QRAKKAIDLAFESAKSL

SEQ ID NO: 8026 - protein, 17 aa, synthetic construct
KESQVRTAKILNVLKET

SEQ ID NO: 8027 - protein, 17 aa, synthetic construct
PLEAVRMQNLIAREAEA

SEQ ID NO: 8028 - protein, 17 aa, synthetic construct
ARDIDTWANVTARSIRA

SEQ ID NO: 8029 - protein, 17 aa, synthetic construct
VVTDVRDFLAARAQALR

SEQ ID NO: 8030 - protein, 17 aa, synthetic construct
AEKAQAIAAARNTFARD

SEQ ID NO: 8031 - protein, 17 aa, synthetic construct
GATHEIQRMIGRAMRTA

SEQ ID NO: 8032 - protein, 17 aa, synthetic construct
TEASIAKAKRLIKLYND

SEQ ID NO: 8033 - protein, 17 aa, synthetic construct
VEAVRHMRLMNEAIAQL

SEQ ID NO: 8034 - protein, 17 aa, synthetic construct
KTDNLKIGKDYLEDVIN

SEQ ID NO: 8035 - protein, 17 aa, synthetic construct
AVTAKLDESLTKVIDFI

SEQ ID NO: 8036 - protein, 17 aa, synthetic construct
DREKALELAMAQIDKNF

SEQ ID NO: 8037 - protein, 17 aa, synthetic construct
NELGRINKIIAEVAEKF

SEQ ID NO: 8038 - protein, 17 aa, synthetic construct
VDVFKTKAQPLIKHILT

SEQ ID NO: 8039 - protein, 17 aa, synthetic construct
LSAAQTLRAAFIKAEKE

SEQ ID NO: 8040 - protein, 17 aa, synthetic construct
LDDLEKARTVLENRINA

SEQ ID NO: 8041 - protein, 17 aa, synthetic construct
AGEQAIRQILDEAGKVG

SEQ ID NO: 8042 - protein, 17 aa, synthetic construct
GLQRAKTGTDKTLVKEV

SEQ ID NO: 8043 - protein, 17 aa, synthetic construct
GTQLEKLMENMRNDIAS

SEQ ID NO: 8044 - protein, 17 aa, synthetic construct
DSIRLLALLSLGEVGHH

SEQ ID NO: 8045 - protein, 17 aa, synthetic construct
IPSISIMLHELIKLLHH

SEQ ID NO: 8046 - protein, 17 aa, synthetic construct
LDDVKALHSKLTSVFAT

SEQ ID NO: 8047 - protein, 17 aa, synthetic construct
SKESGVIQGDLIAKHWQ

SEQ ID NO: 8048 - protein, 17 aa, synthetic construct
TYARAEKALVDIVRHSQ

SEQ ID NO: 8049 - protein, 17 aa, synthetic construct
TNERIAQRALEGFTRSL

SEQ ID NO: 8050 - protein, 17 aa, synthetic construct
ALQKEQAKLSLESWADV

SEQ ID NO: 8051 - protein, 17 aa, synthetic construct
VVDRFLADLQDAVAQVR

SEQ ID NO: 8052 - protein, 17 aa, synthetic construct
REELGRHSWAVLHTLAA

SEQ ID NO: 8053 - protein, 17 aa, synthetic construct
LPTAKDELTKALDLLNS

SEQ ID NO: 8054 - protein, 17 aa, synthetic construct
RLELKALEVAARTSILT

SEQ ID NO: 8055 - protein, 17 aa, synthetic construct
ASERGQLIYKLADLIER

SEQ ID NO: 8056 - protein, 17 aa, synthetic construct
ASHRGRLLNRLADLIER

SEQ ID NO: 8057 - protein, 17 aa, synthetic construct
DAGVLDAYTHHTERLKS

SEQ ID NO: 8058 - protein, 17 aa, synthetic construct
GESRVISVAEVKGLVEQ

SEQ ID NO: 8059 - protein, 17 aa, synthetic construct
KEEALELINGYIQKIKS

SEQ ID NO: 8060 - protein, 17 aa, synthetic construct
DKGQKIAQQIKSIIDIM

SEQ ID NO: 8061 - protein, 17 aa, synthetic construct
YIELDRLSTNLATRLAE

SEQ ID NO: 8062 - protein, 17 aa, synthetic construct
PEVAAEVIKDLVNTVRS

SEQ ID NO: 8063 - protein, 17 aa, synthetic construct
WEDTDALLRQLANAVKA

SEQ ID NO: 8064 - protein, 17 aa, synthetic construct
IEAATHVGKQIVEKILK

SEQ ID NO: 8065 - protein, 17 aa, synthetic construct
DETIELLLNSVKAAFGK

SEQ ID NO: 8066 - protein, 17 aa, synthetic construct
QADRKAEKIIFNELSKA

SEQ ID NO: 8067 - protein, 17 aa, synthetic construct
TEAAAEQGAKLLAKFRQ

SEQ ID NO: 8068 - protein, 17 aa, synthetic construct
IKESIKELVEELSMFAK

SEQ ID NO: 8069 - protein, 17 aa, synthetic construct
SRLSGALNRAEGLMEEL

SEQ ID NO: 8070 - protein, 17 aa, synthetic construct
LENLADGYKHMSLALNR

SEQ ID NO: 8071 - protein, 17 aa, synthetic construct
AREMANAKEIARTVQIM

SEQ ID NO: 8072 - protein, 17 aa, synthetic construct
AEKIDRWVILNSIKLLA

SEQ ID NO: 8073 - protein, 17 aa, synthetic construct
AHVKSHGAKVLASFSEG

SEQ ID NO: 8074 - protein, 17 aa, synthetic construct
SAAIHRLVDTSEKLSKK

SEQ ID NO: 8075 - protein, 17 aa, synthetic construct
RSERAEANLKLLLNAFE

SEQ ID NO: 8076 - protein, 17 aa, synthetic construct
TREAVAKLTAARLAADV

SEQ ID NO: 8077 - protein, 17 aa, synthetic construct
HEYHQTTINNLRAAATE

SEQ ID NO: 8078 - protein, 17 aa, synthetic construct
DVSLELLTKGRSLANEL

SEQ ID NO: 8079 - protein, 17 aa, synthetic construct
QEEALELINGYIQKIKS

SEQ ID NO: 8080 - protein, 17 aa, synthetic construct
PDKNYSKAEKLIKEASK

SEQ ID NO: 8081 - protein, 17 aa, synthetic construct
DNDRAFTIKKLAELVKE

SEQ ID NO: 8082 - protein, 17 aa, synthetic construct
LTKFGELLNASHASLKD

SEQ ID NO: 8083 - protein, 17 aa, synthetic construct
ANDKNAFILNKIKVIHG

SEQ ID NO: 8084 - protein, 17 aa, synthetic construct
VDEAMSFAEVLKQVKSL

SEQ ID NO: 8085 - protein, 17 aa, synthetic construct
LVEKNLKIFKGIVSEVM

SEQ ID NO: 8086 - protein, 17 aa, synthetic construct
VKSARIARNTQIIIQEE

SEQ ID NO: 8087 - protein, 17 aa, synthetic construct
IDEALAFAEILKQIKSM

SEQ ID NO: 8088 - protein, 17 aa, synthetic construct
QTRIKELVKVAQEVGAA

SEQ ID NO: 8089 - protein, 17 aa, synthetic construct
AQVKDALTKMRAAALDA

SEQ ID NO: 8090 - protein, 17 aa, synthetic construct
AKALKAVQDKLKAFVES

SEQ ID NO: 8091 - protein, 17 aa, synthetic construct
RDRAQAVETYLKKLIAT

SEQ ID NO: 8092 - protein, 17 aa, synthetic construct
IPELTNLKNALEAKSKE

SEQ ID NO: 8093 - protein, 17 aa, synthetic construct
PKVGREAITSIIDTLET

SEQ ID NO: 8094 - protein, 17 aa, synthetic construct
KESGIIQGDLIAKHWAA

SEQ ID NO: 8095 - protein, 17 aa, synthetic construct
VTVKRNSANVIAHEIAH

SEQ ID NO: 8096 - protein, 17 aa, synthetic construct
RTEAANVEKITTKLLKA

SEQ ID NO: 8097 - protein, 17 aa, synthetic construct
TARVETVIGIADTFLKR

SEQ ID NO: 8098 - protein, 17 aa, synthetic construct
REEAISNMVVALKELSI

SEQ ID NO: 8099 - protein, 17 aa, synthetic construct
KKIAEDVKTAGATIIKN

SEQ ID NO: 8100 - protein, 17 aa, synthetic construct
IAAQKNDDDRQARALAA

SEQ ID NO: 8101 - protein, 17 aa, synthetic construct
EDVQLTLRNMALEAFKA

SEQ ID NO: 8102 - protein, 17 aa, synthetic construct
SDSRMAMTGAIRKVFVE

SEQ ID NO: 8103 - protein, 17 aa, synthetic construct
KDASEMIKKAVEMTISS

SEQ ID NO: 8104 - protein, 17 aa, synthetic construct
KGPKVRTWLSENGEERL

SEQ ID NO: 8105 - protein, 17 aa, synthetic construct
PDTFKELKQGAHALKLA

SEQ ID NO: 8106 - protein, 17 aa, synthetic construct
PELLAHGRQKILDLLNE

SEQ ID NO: 8107 - protein, 17 aa, synthetic construct
LETVRKATKSALEKAVE

SEQ ID NO: 8108 - protein, 17 aa, synthetic construct
QNIRLTSETQLKKLSND

SEQ ID NO: 8109 - protein, 17 aa, synthetic construct
SETVDRAFSQMKAAIRA

SEQ ID NO: 8110 - protein, 17 aa, synthetic construct
EKIVKMNTDAVDQAVTS

SEQ ID NO: 8111 - protein, 17 aa, synthetic construct
DAGREALDLAAASIRSG

SEQ ID NO: 8112 - protein, 17 aa, synthetic construct
PKMMADGIDKTLEVALT

SEQ ID NO: 8113 - protein, 17 aa, synthetic construct
RAARELQADALEQLGYQ

SEQ ID NO: 8114 - protein, 17 aa, synthetic construct
KTVKDLTKLLYETALLT

SEQ ID NO: 8115 - protein, 17 aa, synthetic construct
GTEANEAAIKIARKYGK

SEQ ID NO: 8116 - protein, 17 aa, synthetic construct
LKVQLIDKLGEVDFRLT

SEQ ID NO: 8117 - protein, 17 aa, synthetic construct
EKRQGALELIKKGYTQQ

SEQ ID NO: 8118 - protein, 17 aa, synthetic construct
PEAADKFKEINNAHAIL

SEQ ID NO: 8119 - protein, 17 aa, synthetic construct
KELAEKALQAVEIARDT

SEQ ID NO: 8120 - protein, 17 aa, synthetic construct
RKQHVAGLKALQDWAQN

SEQ ID NO: 8121 - protein, 17 aa, synthetic construct
KAAVDRALQQVTSTKDA

SEQ ID NO: 8122 - protein, 17 aa, synthetic construct
KADVDNALNAVTRAKAA

SEQ ID NO: 8123 - protein, 17 aa, synthetic construct
LDISLHVLLETFIKGLR

SEQ ID NO: 8124 - protein, 17 aa, synthetic construct
EVYGEKIVKVQELAIKT

SEQ ID NO: 8125 - protein, 17 aa, synthetic construct
RAERAGEATRSLIDKIT

SEQ ID NO: 8126 - protein, 17 aa, synthetic construct
KHAAERLQQALAQAAER

SEQ ID NO: 8127 - protein, 17 aa, synthetic construct
EQYTENLKVIVAEKLAG

SEQ ID NO: 8128 - protein, 17 aa, synthetic construct
RAEAEAEVQRSVERFKA

SEQ ID NO: 8129 - protein, 17 aa, synthetic construct
NADKQVTSILKKAGDLL

SEQ ID NO: 8130 - protein, 17 aa, synthetic construct
QETQKGALKEIQAFIRS

SEQ ID NO: 8131 - protein, 17 aa, synthetic construct
VETTRKIITNLTEGASR

SEQ ID NO: 8132 - protein, 17 aa, synthetic construct
KDGETKILKETVEELKK

SEQ ID NO: 8133 - protein, 17 aa, synthetic construct
KDVEKVIRAAAIANKET

SEQ ID NO: 8134 - protein, 17 aa, synthetic construct
GWRAAETNVAKSEAEKR

SEQ ID NO: 8135 - protein, 17 aa, synthetic construct
RLIDAHNQAVDFAVRQV

SEQ ID NO: 8136 - protein, 17 aa, synthetic construct
DETRREMGNAAVRAAKA

SEQ ID NO: 8137 - protein, 17 aa, synthetic construct
VNDLIKENVKMAVKNVV

SEQ ID NO: 8138 - protein, 17 aa, synthetic construct
EQDFAVLTAEITSKIAR

SEQ ID NO: 8139 - protein, 17 aa, synthetic construct
NQAVSILVAKVEEIFKD

SEQ ID NO: 8140 - protein, 17 aa, synthetic construct
MGALTALIRDQKARVEA

SEQ ID NO: 8141 - protein, 17 aa, synthetic construct
SRADAAVTDDARGLLAA

SEQ ID NO: 8142 - protein, 17 aa, synthetic construct
GEEKSRALAVLKAALNS

SEQ ID NO: 8143 - protein, 17 aa, synthetic construct
LAAQKTLVDGIRKEVAA

SEQ ID NO: 8144 - protein, 17 aa, synthetic construct
HEFTKLVKELEGVITKA

SEQ ID NO: 8145 - protein, 17 aa, synthetic construct
VEAALDNLMIKVYEITK

SEQ ID NO: 8146 - protein, 17 aa, synthetic construct
DGKRLENLVRGIFAGNI

SEQ ID NO: 8147 - protein, 17 aa, synthetic construct
LQATIAGKLDKLRDAQR

SEQ ID NO: 8148 - protein, 17 aa, synthetic construct
KKDAEISAGRTALLAIQ

SEQ ID NO: 8149 - protein, 17 aa, synthetic construct
ADVLKKTIKNTLDIHKS

SEQ ID NO: 8150 - protein, 17 aa, synthetic construct
LNLKQAKEEAIKELVDA

SEQ ID NO: 8151 - protein, 17 aa, synthetic construct
ETHANKIVRAYELALKV

SEQ ID NO: 8152 - protein, 17 aa, synthetic construct
HELLDESAKKIVEVAKS

SEQ ID NO: 8153 - protein, 17 aa, synthetic construct
HMASKRDKIADIQEALA

SEQ ID NO: 8154 - protein, 17 aa, synthetic construct
DDLQRAIALSLAESNRA

SEQ ID NO: 8155 - protein, 17 aa, synthetic construct
DSTAAVAVLKRAVELDA

SEQ ID NO: 8156 - protein, 17 aa, synthetic construct
EQTADQIFKLSHLLKLT

SEQ ID NO: 8157 - protein, 17 aa, synthetic construct
ITVDRLVSKALNMWGKE

SEQ ID NO: 8158 - protein, 17 aa, synthetic construct
SIDYAAEIAKDMIKKAN

SEQ ID NO: 8159 - protein, 17 aa, synthetic construct
IGERVVRAHLSVWDDVS

SEQ ID NO: 8160 - protein, 17 aa, synthetic construct
PSLAEHALKALDRIMAQ

SEQ ID NO: 8161 - protein, 17 aa, synthetic construct
KGRDILTKTIILALREV

SEQ ID NO: 8162 - protein, 17 aa, synthetic construct
ARDVDNTIKLAKALLEE

SEQ ID NO: 8163 - protein, 17 aa, synthetic construct
NAALAKFETIRAHGALR

SEQ ID NO: 8164 - protein, 17 aa, synthetic construct
HITVDRLVSKALNMWGK

SEQ ID NO: 8165 - protein, 17 aa, synthetic construct
EDMEKRANEVANLLKTL

SEQ ID NO: 8166 - protein, 17 aa, synthetic construct
DVQIQKDNLVKDAIRAN

SEQ ID NO: 8167 - protein, 17 aa, synthetic construct
KGTFAIAKAMGRGTHEH

SEQ ID NO: 8168 - protein, 17 aa, synthetic construct
RERVLEAAQGLRQALLA

SEQ ID NO: 8169 - protein, 17 aa, synthetic construct
KKAEAVATVVAAVDQAR

SEQ ID NO: 8170 - protein, 17 aa, synthetic construct
GGGTDLGKFVLAKKEEN

SEQ ID NO: 8171 - protein, 17 aa, synthetic construct
NDQLKTVVGEFTALLDK

SEQ ID NO: 8172 - protein, 17 aa, synthetic construct
LDKNYSKAEKLIKEASK

SEQ ID NO: 8173 - protein, 17 aa, synthetic construct
HHAVEQIRAKISTAIFQ

SEQ ID NO: 8174 - protein, 17 aa, synthetic construct
DQRRLDLVHTAALMLDK

SEQ ID NO: 8175 - protein, 17 aa, synthetic construct
AKEKSKFEDMAKSDKAR

SEQ ID NO: 8176 - protein, 17 aa, synthetic construct
KLGETEQEGIAGRMIRN

SEQ ID NO: 8177 - protein, 17 aa, synthetic construct
KDEVYQILEKGAAKRTT

SEQ ID NO: 8178 - protein, 17 aa, synthetic construct
IPGIVEDYRQAAQRAKR

SEQ ID NO: 8179 - protein, 17 aa, synthetic construct
PTLVNEIAKEIVNYLKK

SEQ ID NO: 8180 - protein, 17 aa, synthetic construct
QRARAVLDRAAELATIA

SEQ ID NO: 8181 - protein, 17 aa, synthetic construct
AEAEKRIQEAAVTIYKA

SEQ ID NO: 8182 - protein, 17 aa, synthetic construct
PRAKKVLELSLREALQL

SEQ ID NO: 8183 - protein, 17 aa, synthetic construct
FIQRTAHDRILPALISK

SEQ ID NO: 8184 - protein, 17 aa, synthetic construct
HRLIDQATAEIVETAKR

SEQ ID NO: 8185 - protein, 17 aa, synthetic construct
WPRVRRDIANLGQAAEA

SEQ ID NO: 8186 - protein, 17 aa, synthetic construct
PRLLGETAGLKQVEADT

SEQ ID NO: 8187 - protein, 17 aa, synthetic construct
EKTFNLAMALKVESILK

SEQ ID NO: 8188 - protein, 17 aa, synthetic construct
YGVARQLKESQDKSIDN

SEQ ID NO: 8189 - protein, 17 aa, synthetic construct
EATRAKMRAASERLGSL

SEQ ID NO: 8190 - protein, 17 aa, synthetic construct
TAHKNAVTLRVNALKEQ

SEQ ID NO: 8191 - protein, 17 aa, synthetic construct
QLAVEKGNLENKKSITE

SEQ ID NO: 8192 - protein, 17 aa, synthetic construct
YPLLVKILDSLGERKVT

SEQ ID NO: 8193 - protein, 17 aa, synthetic construct
RGHQKLINATVEKAREV

SEQ ID NO: 8194 - protein, 17 aa, synthetic construct
TAAKNAALEAVARAIER

SEQ ID NO: 8195 - protein, 17 aa, synthetic construct
PETLRQVTQHAEHVVNA

SEQ ID NO: 8196 - protein, 17 aa, synthetic construct
GAHRATYLRAIAAKITE

SEQ ID NO: 8197 - protein, 17 aa, synthetic construct
RENVDRVTEALRAALQH

SEQ ID NO: 8198 - protein, 17 aa, synthetic construct
AEAAKAEIVASFERAKN

SEQ ID NO: 8199 - protein, 17 aa, synthetic construct
TEVDIQASMAYAKALEK

SEQ ID NO: 8200 - protein, 17 aa, synthetic construct
HSSKNDIHTLLMDLNSY

SEQ ID NO: 8201 - protein, 17 aa, synthetic construct
ISSITDGLKTKIVAERL

SEQ ID NO: 8202 - protein, 17 aa, synthetic construct
SDIRDIVQSAHMRVVKE

SEQ ID NO: 8203 - protein, 17 aa, synthetic construct
FRQAHTASGKAVHLAET

SEQ ID NO: 8204 - protein, 17 aa, synthetic construct
HSSKNDIHTLLKDLNSY

SEQ ID NO: 8205 - protein, 17 aa, synthetic construct
LAVELKQSTAQAHEKAE

SEQ ID NO: 8206 - protein, 17 aa, synthetic construct
ELEAEATHRVITIANRT

SEQ ID NO: 8207 - protein, 17 aa, synthetic construct
SEVDIQASIAYAKALEK

SEQ ID NO: 8208 - protein, 17 aa, synthetic construct
KILEASVIIWRVIDDTA

SEQ ID NO: 8209 - protein, 17 aa, synthetic construct
RGQRQMEVLSAIIDKSK

SEQ ID NO: 8210 - protein, 17 aa, synthetic construct
HEKLTQARNQLLAEAAK

SEQ ID NO: 8211 - protein, 17 aa, synthetic construct
PEVHRLTHALRAATRIV

SEQ ID NO: 8212 - protein, 17 aa, synthetic construct
KDARALQADAMEQLGYQ

SEQ ID NO: 8213 - protein, 17 aa, synthetic construct
QRHVERAARAAVQALQL

SEQ ID NO: 8214 - protein, 17 aa, synthetic construct
VEDTVEALGKIRNAIAR

SEQ ID NO: 8215 - protein, 17 aa, synthetic construct
NEAADLVIKSMEKTIAS

SEQ ID NO: 8216 - protein, 17 aa, synthetic construct
ATDQKVEKMLISSIKEK

SEQ ID NO: 8217 - protein, 17 aa, synthetic construct
ADDTLALARARGEAMSA

SEQ ID NO: 8218 - protein, 17 aa, synthetic construct
REVSLTSGRLVLQGLRD

SEQ ID NO: 8219 - protein, 17 aa, synthetic construct
PDVREMNGVLKGMLSEW

SEQ ID NO: 8220 - protein, 17 aa, synthetic construct
VEEAVRIVKEVIQKLAN

SEQ ID NO: 8221 - protein, 17 aa, synthetic construct
LIKQAEAKKELEVFLDT

SEQ ID NO: 8222 - protein, 17 aa, synthetic construct
VNLIRERGQFIGEEVKA

SEQ ID NO: 8223 - protein, 17 aa, synthetic construct
LDESLKIVKEYLIAATA

SEQ ID NO: 8224 - protein, 17 aa, synthetic construct
AKVLAHGEKVLTSFGEG

SEQ ID NO: 8225 - protein, 17 aa, synthetic construct
RYERQKILLATAEALAA

SEQ ID NO: 8226 - protein, 17 aa, synthetic construct
PTISLKTVKLMKEGLEA

SEQ ID NO: 8227 - protein, 17 aa, synthetic construct
TKEKIAITENALAVAHQ

SEQ ID NO: 8228 - protein, 17 aa, synthetic construct
GVPASKTIAERDLKAMD

SEQ ID NO: 8229 - protein, 17 aa, synthetic construct
TYLKHDSVLKTIRGLVE

SEQ ID NO: 8230 - protein, 17 aa, synthetic construct
AEVAETKVAMVNKYARE

SEQ ID NO: 8231 - protein, 17 aa, synthetic construct
DALVRDAQQAAARIADS

SEQ ID NO: 8232 - protein, 17 aa, synthetic construct
DTMADSYGKVMGRDGRA

SEQ ID NO: 8233 - protein, 17 aa, synthetic construct
PGLVKETKRALNRALET

SEQ ID NO: 8234 - protein, 17 aa, synthetic construct
YLKEALRLAQEALNRLG

SEQ ID NO: 8235 - protein, 17 aa, synthetic construct
HSVWQRMGDELLAKAAE

SEQ ID NO: 8236 - protein, 17 aa, synthetic construct
ADEIKNVWKEEVSRLVG

SEQ ID NO: 8237 - protein, 17 aa, synthetic construct
EAAVTRSAERIVGQMEK

SEQ ID NO: 8238 - protein, 17 aa, synthetic construct
EAQRTALYTKAEQQLDK

SEQ ID NO: 8239 - protein, 17 aa, synthetic construct
LEDRAATLSKIIQVAVE

SEQ ID NO: 8240 - protein, 17 aa, synthetic construct
ETGIKEAKLGGERLKSR

SEQ ID NO: 8241 - protein, 17 aa, synthetic construct
QQQLDRAIEAFGQVGKK

SEQ ID NO: 8242 - protein, 17 aa, synthetic construct
PAAADATIAEAVKSARK

SEQ ID NO: 8243 - protein, 17 aa, synthetic construct
EENLKQARAALERLYTA

SEQ ID NO: 8244 - protein, 17 aa, synthetic construct
PEVTVEAIKRLSDLFAR

SEQ ID NO: 8245 - protein, 17 aa, synthetic construct
SHDARKEHKQFVAELKA

SEQ ID NO: 8246 - protein, 17 aa, synthetic construct
AAQRARVETEALKYLRA

SEQ ID NO: 8247 - protein, 17 aa, synthetic construct
PLTVKKHLRAQAIALEN

SEQ ID NO: 8248 - protein, 17 aa, synthetic construct
TDAVKKIAEAAFRVNEK

SEQ ID NO: 8249 - protein, 17 aa, synthetic construct
LENSKLNQKVIDAIYRA

SEQ ID NO: 8250 - protein, 17 aa, synthetic construct
LTELNSLISRLADDTKT

SEQ ID NO: 8251 - protein, 17 aa, synthetic construct
INDGLRIARKLLLDIND

SEQ ID NO: 8252 - protein, 17 aa, synthetic construct
NEASKALTSARFVLSDK

SEQ ID NO: 8253 - protein, 17 aa, synthetic construct
AVSERGAAEALTAIRRG

SEQ ID NO: 8254 - protein, 17 aa, synthetic construct
RTGVFIALDHLTQHIND

SEQ ID NO: 8255 - protein, 17 aa, synthetic construct
LHEKLFLLAIVRSLKIS

SEQ ID NO: 8256 - protein, 17 aa, synthetic construct
KDTSKKVQMARLAWEAS

SEQ ID NO: 8257 - protein, 17 aa, synthetic construct
GLQKEQAKLSLESWADV

SEQ ID NO: 8258 - protein, 17 aa, synthetic construct
LTKNLKVVKELISEAIQ

SEQ ID NO: 8259 - protein, 17 aa, synthetic construct
DATTAARAARLAAVAED

SEQ ID NO: 8260 - protein, 17 aa, synthetic construct
EAHAEKVHSYVTAGITS

SEQ ID NO: 8261 - protein, 18 aa, synthetic construct
QLVARLEGEVMLSALARK

SEQ ID NO: 8262 - protein, 18 aa, synthetic construct
TARVEEAQQAAVRIADTL

SEQ ID NO: 8263 - protein, 18 aa, synthetic construct
PRSVGKASEQLAGKVAEV

SEQ ID NO: 8264 - protein, 18 aa, synthetic construct
EADIHEGMQRFAQAVGKV

SEQ ID NO: 8265 - protein, 18 aa, synthetic construct
PKLVRAAVEAHSKALDSA

SEQ ID NO: 8266 - protein, 18 aa, synthetic construct
LETVRKATKSALEKAVEL

SEQ ID NO: 8267 - protein, 18 aa, synthetic construct
SLETVRKATKSALEKAVE

SEQ ID NO: 8268 - protein, 18 aa, synthetic construct
ERFNAALHESAHTVIAQV

SEQ ID NO: 8269 - protein, 18 aa, synthetic construct
SEVDIQGSMAYAKALEKA

SEQ ID NO: 8270 - protein, 18 aa, synthetic construct
RAAAAEIAVKTVSEFITR

SEQ ID NO: 8271 - protein, 18 aa, synthetic construct
IAAGQNELLKRAKANGDA

SEQ ID NO: 8272 - protein, 18 aa, synthetic construct
DAGRKNFAKTAVKLLQDL

SEQ ID NO: 8273 - protein, 18 aa, synthetic construct
EMAFKIAGSMAIKEAVQK

SEQ ID NO: 8274 - protein, 18 aa, synthetic construct
ARELAELGMKITAAANEQ

SEQ ID NO: 8275 - protein, 18 aa, synthetic construct
EKTMLVLALLLAKKVASH

SEQ ID NO: 8276 - protein, 18 aa, synthetic construct
ADAQKREVAAFLAQTSHE

SEQ ID NO: 8277 - protein, 18 aa, synthetic construct
IAHNLAQVRDKISAAATR

SEQ ID NO: 8278 - protein, 18 aa, synthetic construct
GDPIEINGLKAAFKELSN

SEQ ID NO: 8279 - protein, 18 aa, synthetic construct
LPGRIVQDQKNARAHAVT

SEQ ID NO: 8280 - protein, 18 aa, synthetic construct
EFDLLGQAAASKLARDLT

SEQ ID NO: 8281 - protein, 18 aa, synthetic construct
TDEGLKEATKLTQSVKKL

SEQ ID NO: 8282 - protein, 18 aa, synthetic construct
DAELAQSISMTRAEAKAA

SEQ ID NO: 8283 - protein, 18 aa, synthetic construct
GSAFESAMVNHVTKVADH

SEQ ID NO: 8284 - protein, 18 aa, synthetic construct
AKVKAHGKKVIDSFSEGL

SEQ ID NO: 8285 - protein, 18 aa, synthetic construct
SKESGIIQGDLIAKHWAA

SEQ ID NO: 8286 - protein, 18 aa, synthetic construct
AEQAQQVHAFLRGRLAAK

SEQ ID NO: 8287 - protein, 18 aa, synthetic construct
ADLKGQLAQRIVDDVSVA

SEQ ID NO: 8288 - protein, 18 aa, synthetic construct
SESLVKTLISEFAAVAEK

SEQ ID NO: 8289 - protein, 18 aa, synthetic construct
FRQAHTASGKAVHLAETK

SEQ ID NO: 8290 - protein, 18 aa, synthetic construct
IQSKVALKTFAAADQREA

SEQ ID NO: 8291 - protein, 18 aa, synthetic construct
DNVMTAEMRKIAMAAVLD

SEQ ID NO: 8292 - protein, 18 aa, synthetic construct
ISYIIRKADSVNKALDSA

SEQ ID NO: 8293 - protein, 18 aa, synthetic construct
VSKMLASFEKIITETVAK

SEQ ID NO: 8294 - protein, 18 aa, synthetic construct
AAEVNTRVAKVVQDAANK

SEQ ID NO: 8295 - protein, 18 aa, synthetic construct
NKEQAKAREAIGNGLTML

SEQ ID NO: 8296 - protein, 18 aa, synthetic construct
PMIAKHGTTILHGLDRAV

SEQ ID NO: 8297 - protein, 18 aa, synthetic construct
EKILNDVSQAKAQHLKAA

SEQ ID NO: 8298 - protein, 18 aa, synthetic construct
VVAEVKAFLEAQARRALS

SEQ ID NO: 8299 - protein, 18 aa, synthetic construct
PIAIAEVREALTRTLATE

SEQ ID NO: 8300 - protein, 18 aa, synthetic construct
AGAATEEFIKRAEVNGLA

SEQ ID NO: 8301 - protein, 18 aa, synthetic construct
AKDAGLFIGSIVQEIAER

SEQ ID NO: 8302 - protein, 18 aa, synthetic construct
YDIAMEIVNGVDRVIKAS

SEQ ID NO: 8303 - protein, 18 aa, synthetic construct
DAATIKALLSHAHEAQRS

SEQ ID NO: 8304 - protein, 18 aa, synthetic construct
KNEQLAIAHGIQKIIAEN

SEQ ID NO: 8305 - protein, 18 aa, synthetic construct
LAAQKTLVDGIRKEVAAE

SEQ ID NO: 8306 - protein, 18 aa, synthetic construct
KAAFLKATDELIAAVTAH

SEQ ID NO: 8307 - protein, 18 aa, synthetic construct
AEARGNRMADQAAREAAM

SEQ ID NO: 8308 - protein, 18 aa, synthetic construct
GAQALKAVLEHGPTLRQR

SEQ ID NO: 8309 - protein, 18 aa, synthetic construct
KVGNIIDTMITDAFLKAD

SEQ ID NO: 8310 - protein, 18 aa, synthetic construct
GGAKASDDARTLAEVFTK

SEQ ID NO: 8311 - protein, 18 aa, synthetic construct
RAKASFDTRVAAAELALA

SEQ ID NO: 8312 - protein, 18 aa, synthetic construct
TDQLLEHAKESLTHAKAA

SEQ ID NO: 8313 - protein, 18 aa, synthetic construct
RAEVDLVVQDLKQAVAQL

SEQ ID NO: 8314 - protein, 18 aa, synthetic construct
GADLENLLNEAALLAARK

SEQ ID NO: 8315 - protein, 18 aa, synthetic construct
ADVRKNANEAVLGIMIHL

SEQ ID NO: 8316 - protein, 18 aa, synthetic construct
IAAAIETTRTVLAAARER

SEQ ID NO: 8317 - protein, 18 aa, synthetic construct
VEADVTIGPYLKAQADKQ

SEQ ID NO: 8318 - protein, 18 aa, synthetic construct
TKQILDAKGPEGVVDWVK

SEQ ID NO: 8319 - protein, 18 aa, synthetic construct
GAQALKAVLEHGPTLNER

SEQ ID NO: 8320 - protein, 18 aa, synthetic construct
RPEAEAVSMLVKEAVVTF

SEQ ID NO: 8321 - protein, 18 aa, synthetic construct
IADKAEQVIQNIKNVLEA

SEQ ID NO: 8322 - protein, 18 aa, synthetic construct
PMVRAHGKKVLTSFGDAV

SEQ ID NO: 8323 - protein, 18 aa, synthetic construct
SNKEALAKGMLLLFAHHL

SEQ ID NO: 8324 - protein, 18 aa, synthetic construct
PLEAVRMQNLIAREAEAA

SEQ ID NO: 8325 - protein, 18 aa, synthetic construct
ATGDLALKKLENAIKKVQ

SEQ ID NO: 8326 - protein, 18 aa, synthetic construct
VETRKVMADLVVGNLEAH

SEQ ID NO: 8327 - protein, 18 aa, synthetic construct
AQTRDGIIAGFKKALDET

SEQ ID NO: 8328 - protein, 18 aa, synthetic construct
KDLASALELLTGLRKKIA

SEQ ID NO: 8329 - protein, 18 aa, synthetic construct
RAQAQKLAGTAHDGLARA

SEQ ID NO: 8330 - protein, 18 aa, synthetic construct
PTLVKRQATTIAKELAEL

SEQ ID NO: 8331 - protein, 18 aa, synthetic construct
VEKNLKIFKGIVSEVMAS

SEQ ID NO: 8332 - protein, 18 aa, synthetic construct
ENAANTVAHARKAIHKIL

SEQ ID NO: 8333 - protein, 18 aa, synthetic construct
EDLKKVGNRVLTALGGIL

SEQ ID NO: 8334 - protein, 18 aa, synthetic construct
EDLKKHGVTFLTALGAIL

SEQ ID NO: 8335 - protein, 18 aa, synthetic construct
EDLKKHGVTALTALGAIL

SEQ ID NO: 8336 - protein, 18 aa, synthetic construct
VQDIKNNLKEAIETIVAA

SEQ ID NO: 8337 - protein, 18 aa, synthetic construct
GESRVISVAEVKGLVEQW

SEQ ID NO: 8338 - protein, 18 aa, synthetic construct
AAQVKDALTKMRAAALDA

SEQ ID NO: 8339 - protein, 18 aa, synthetic construct
EDLKKHGATVLTALGGIL

SEQ ID NO: 8340 - protein, 18 aa, synthetic construct
QVKGHGKKVADALTNAVA

SEQ ID NO: 8341 - protein, 18 aa, synthetic construct
VVDRFLADLQDAVAQVRA

SEQ ID NO: 8342 - protein, 18 aa, synthetic construct
EDLKKDGVTSLTALGAIL

SEQ ID NO: 8343 - protein, 18 aa, synthetic construct
ADEQRSVRALVTATTAVD

SEQ ID NO: 8344 - protein, 18 aa, synthetic construct
EEVKKHGTTVLTALGRIL

SEQ ID NO: 8345 - protein, 18 aa, synthetic construct
VDEGVDLVIRAISAAKQR

SEQ ID NO: 8346 - protein, 18 aa, synthetic construct
AESIAKAQKSREIFEGIA

SEQ ID NO: 8347 - protein, 18 aa, synthetic construct
EDLKKHGVTVLTALGAIL

SEQ ID NO: 8348 - protein, 18 aa, synthetic construct
RDALIENYKTSIRNVGAA

SEQ ID NO: 8349 - protein, 18 aa, synthetic construct
TEELAVDALYNAIKVRLA

SEQ ID NO: 8350 - protein, 18 aa, synthetic construct
PGTGEIVAEAVDAAIRKT

SEQ ID NO: 8351 - protein, 18 aa, synthetic construct
PETAADKLLAAINERRAG

SEQ ID NO: 8352 - protein, 18 aa, synthetic construct
LGASGARILTTLVHEMRR

SEQ ID NO: 8353 - protein, 18 aa, synthetic construct
EDLKKHGVTVLTGLGAIL

SEQ ID NO: 8354 - protein, 18 aa, synthetic construct
YEGELNKVTSNVAIGRSH

SEQ ID NO: 8355 - protein, 18 aa, synthetic construct
GATLTGTVQDIIRELARH

SEQ ID NO: 8356 - protein, 18 aa, synthetic construct
RAKASFDTRVAAAELALN

SEQ ID NO: 8357 - protein, 18 aa, synthetic construct
GPEVMDAAIRVLKTVLDN

SEQ ID NO: 8358 - protein, 18 aa, synthetic construct
RSEADDLATRVANAVRDA

SEQ ID NO: 8359 - protein, 18 aa, synthetic construct
GATQNLPKLAEFIRIAKE

SEQ ID NO: 8360 - protein, 18 aa, synthetic construct
VDGAVRMGQRTAADIIAR

SEQ ID NO: 8361 - protein, 18 aa, synthetic construct
HAQITETAGAVKRAMRDA

SEQ ID NO: 8362 - protein, 18 aa, synthetic construct
AKELVDRSVSLSKAVKAI

SEQ ID NO: 8363 - protein, 18 aa, synthetic construct
EDLKKHGNTVLTALGGIL

SEQ ID NO: 8364 - protein, 18 aa, synthetic construct
PEALLKRADEGVYQAKAS

SEQ ID NO: 8365 - protein, 18 aa, synthetic construct
EVYQILEKGAAKRTTAAT

SEQ ID NO: 8366 - protein, 18 aa, synthetic construct
LDEVNKKAFQGTLLAHVD

SEQ ID NO: 8367 - protein, 18 aa, synthetic construct
GDKKAALVSYIGETRQQL

SEQ ID NO: 8368 - protein, 18 aa, synthetic construct
EDLKKHGTVVLTALGGIL

SEQ ID NO: 8369 - protein, 18 aa, synthetic construct
KESLVMAGDLVIKTAKKH

SEQ ID NO: 8370 - protein, 18 aa, synthetic construct
NTYVKGANAALEKIEKHL

SEQ ID NO: 8371 - protein, 18 aa, synthetic construct
ESEKVNEIVKAVKTALTG

SEQ ID NO: 8372 - protein, 18 aa, synthetic construct
GAQALHTVLDLEPALGKR

SEQ ID NO: 8373 - protein, 18 aa, synthetic construct
DEDKAVDLIVFKKAVLST

SEQ ID NO: 8374 - protein, 18 aa, synthetic construct
VGATGGRMLATLARELHR

SEQ ID NO: 8375 - protein, 18 aa, synthetic construct
SEVDIQASIAYAKALEKA

SEQ ID NO: 8376 - protein, 18 aa, synthetic construct
TDTAILLKDALAAAHARY

SEQ ID NO: 8377 - protein, 18 aa, synthetic construct
RDLLETAGKLMAKESIAK

SEQ ID NO: 8378 - protein, 19 aa, synthetic construct
EDLKKQGVTVLTALGAILK

SEQ ID NO: 8379 - protein, 19 aa, synthetic construct
AAQVKDALTKMRAAALDAQ

SEQ ID NO: 8380 - protein, 19 aa, synthetic construct
TKAGVLADALDKATEKLLN

SEQ ID NO: 8381 - protein, 19 aa, synthetic construct
EDLKKDGVTALTALGAILK

SEQ ID NO: 8382 - protein, 19 aa, synthetic construct
EDLKEHGTVVLTALGGILK

SEQ ID NO: 8383 - protein, 19 aa, synthetic construct
EDLKKVGNTTLTALGGILK

SEQ ID NO: 8384 - protein, 19 aa, synthetic construct
DAELNSLAKGAVKELASLY

SEQ ID NO: 8385 - protein, 19 aa, synthetic construct
NSAIGYEEAAKVAKQALAE

SEQ ID NO: 8386 - protein, 19 aa, synthetic construct
TGPAIDHAADLLLSHARNV

SEQ ID NO: 8387 - protein, 19 aa, synthetic construct
AEELDKVARLAAKALASVS

SEQ ID NO: 8388 - protein, 19 aa, synthetic construct
GELAKHAVSEGTKAVTKYT

SEQ ID NO: 8389 - protein, 19 aa, synthetic construct
DADLAAAVESAKAAQPKWA

SEQ ID NO: 8390 - protein, 19 aa, synthetic construct
EKAKVLAKALDTATGKLLE

SEQ ID NO: 8391 - protein, 19 aa, synthetic construct
DAEQAQELARIAKAATFAA

SEQ ID NO: 8392 - protein, 19 aa, synthetic construct
IDSTIKSGLTAARDVNRAS

SEQ ID NO: 8393 - protein, 19 aa, synthetic construct
EDLKKHGVTVLTGLGAILK

SEQ ID NO: 8394 - protein, 19 aa, synthetic construct
GGGTDLGKFVLAKKEENAK

SEQ ID NO: 8395 - protein, 19 aa, synthetic construct
PSVGSLAEKVDAERIAIAK

SEQ ID NO: 8396 - protein, 19 aa, synthetic construct
EDLKKLGVTVLTALGAILK

SEQ ID NO: 8397 - protein, 19 aa, synthetic construct
AQVKGHGKKVADALTNAVA

SEQ ID NO: 8398 - protein, 19 aa, synthetic construct
KLLSAAKILADATAKMVEA

SEQ ID NO: 8399 - protein, 106 aa, synthetic construct [sequence omitted]

SEQ ID NO: 8400 - protein, 121 aa, synthetic construct [sequence omitted]

SEQ ID NO: 8401 - protein, 5 aa, synthetic construct
SSVSY

SEQ ID NO: 8402 - skipped

SEQ ID NO: 8403 - protein, 9 aa, synthetic construct
QQWTSNPPT

SEQ ID NO: 8404 - protein, 8 aa, synthetic construct
GYTFTSYN

SEQ ID NO: 8405 - protein, 8 aa, synthetic construct
IYPGNGDT

SEQ ID NO: 8406 - protein, 14 aa, synthetic construct
ARSTYYGGDWYFNV

SEQ ID NO: 8407 - protein, 106 aa, synthetic construct [sequence omitted]

SEQ ID NO: 8408 - protein, 122 aa, synthetic construct [sequence omitted]

SEQ ID NO: 8409 - protein, 5 aa, synthetic construct
SSVSY

SEQ ID NO: 8410 - skipped

SEQ ID NO: 8411 - protein, 9 aa, synthetic construct
QQWSFNPPT

SEQ ID NO: 8412 - protein, 8 aa, synthetic construct
GYTFTSYN

SEQ ID NO: 8413 - protein, 8 aa, synthetic construct
IYPGNGDT

SEQ ID NO: 8414 - protein, 15 aa, synthetic construct
ARVVYYSNSYWYFDV

SEQ ID NO: 8415 - protein, 112 aa, synthetic construct
DIVMTQTPLSLPVTPGEPASISCRSSKSLLHSNGITYLYWYLQKPGQSPQLLIYQMSNLVSGVPDRFSGSGSGTDFTLKISRVEAEDVGVYYCAQNLELPYTFGGGTKVEIK

SEQ ID NO: 8416 - protein, 119 aa, synthetic construct
QVQLVQSGAEVKKPGSSVKVSCKASGYAFSYSWINWVRQAPGQGLEWMGRIFPGDGDTDYNGKFKGRVTITADKSTSTAYMELSSLRSEDTAVYYCARNVFDGYWLVYWGQGTLVTVSS

SEQ ID NO: 8417 - protein, 11 aa, synthetic construct
KSLLHSNGITY

SEQ ID NO: 8418 - skipped

SEQ ID NO: 8419 - protein, 9 aa, synthetic construct
AQNLELPYT

SEQ ID NO: 8420 - protein, 8 aa, synthetic construct
GYAFSYSW

SEQ ID NO: 8421 - protein, 8 aa, synthetic construct
IFPGDGDT

SEQ ID NO: 8422 - protein, 12 aa, synthetic construct
ARNVFDGYWLVY

SEQ ID NO: 8423 - protein, 107 aa, synthetic construct
EIVLTQSPATLSLSPGERATLSCRASQSVSSYLAWYQQKPGQAPRLLIYDASNRATGIPARFSGSGSGTDFTLTISSLEPEDFAVYYCQQRSNWPITFGQGTRLEIK

SEQ ID NO: 8424 - protein, 122 aa, synthetic construct
EVQLVESGGGLVQPGRSLRLSCAASGFTFNDYAMHWVRQAPGKGLEWVSTISWNSGSIGYADSVKGRFTISRDNAKKSLYLQMNSLRAEDTALYYCAKDIQYGNYYYGMDVWGQGTTVTVSS

SEQ ID NO: 8425 - protein, 6 aa, synthetic construct
QSVSSY

SEQ ID NO: 8426 - skipped

SEQ ID NO: 8427 - protein, 9 aa, synthetic construct
QQRSNWPIT

SEQ ID NO: 8428 - protein, 8 aa, synthetic construct
GFTFNDYA

SEQ ID NO: 8429 - protein, 8 aa, synthetic construct
ISWNSGSI

SEQ ID NO: 8430 - protein, 15 aa, synthetic construct
AKDIQYGNYYYGMDV

SEQ ID NO: 8431 - protein, 106 aa, synthetic construct
QIVLSQSPAILSASPGEKVTMTCRASSSVSYMHWYQQKPGSSPKPWIYATSNLASGVPARFSGSGSGTSYSFTISRVEAEDAATYYCQQWTFNPPTFGGGTRLEIK

SEQ ID NO: 8432 - protein, 118 aa, synthetic construct
QAYLQQSGAELVRPGASVKMSCKASGYTFTSYNMHWVKQTPRQGLEWIGGIYPGNGDTSYNQKFKGKATLTVGKSSSTAYMQLSSLTSEDSAVYFCARYDYNYAMDYWGQGTSVTVSS

SEQ ID NO: 8433 - protein, 5 aa, synthetic construct
SSVSY

SEQ ID NO: 8434 - skipped

SEQ ID NO: 8435 - protein, 9 aa, synthetic construct
QQWTFNPPT

SEQ ID NO: 8436 - protein, 8 aa, synthetic construct
GYTFTSYN

SEQ ID NO: 8437 - protein, 8 aa, synthetic construct
IYPGNGDT

SEQ ID NO: 8438 - protein, 11 aa, synthetic construct
ARYDYNYAMDY

SEQ ID NO: 8439 - protein, 112 aa, synthetic construct
DVVMTQSPLSLPVTPGAPASISCRSSQSIVHSNGNTYLEWYLQKPGQSPKLLIYKVSNRFSGVPDRFSGSGSGTDFTLRISRVEAEDVGIYYCFQGSHVPPTFGPGTKLEIK

SEQ ID NO: 8440 - protein, 124 aa, synthetic construct
EVQLVESGGGLVQPGGSLRLSCSASGFTFSSFGMHWVRQAPGKGLEWVAYISSGSSTIYYGDTVKGRFTISRDNAKNSLFLQMSSLRAEDTAVYYCAREGGYYYGRSYYTMDYWGQGTTVTVSS

SEQ ID NO: 8441 - protein, 11 aa, synthetic construct
QSIVHSNGNTY

SEQ ID NO: 8442 - skipped

SEQ ID NO: 8443 - protein, 9 aa, synthetic construct
FQGSHVPPT

SEQ ID NO: 8444 - protein, 8 aa, synthetic construct
GFTFSSFG

SEQ ID NO: 8445 - protein, 8 aa, synthetic construct
ISSGSSTI

SEQ ID NO: 8446 - protein, 17 aa, synthetic construct
AREGGYYYGRSYYTMDY

SEQ ID NO: 8447 - protein, 108 aa, synthetic construct [sequence omitted]

SEQ ID NO: 8448 - protein, 126 aa, synthetic construct [sequence omitted]

SEQ ID NO: 8449 - protein, 7 aa, synthetic construct
QSVSSSY

SEQ ID NO: 8450 - skipped

SEQ ID NO: 8451 - protein, 9 aa, synthetic construct
LQIYNMPIT

SEQ ID NO: 8452 - protein, 8 aa, synthetic construct
GFTFSSYA

SEQ ID NO: 8453 - protein, 8 aa, synthetic construct
INASGTRT

SEQ ID NO: 8454 - protein, 19 aa, synthetic construct
ARGKGNTHKPYGYVRYFDV

SEQ ID NO: 8455 - protein, 107 aa, synthetic construct [sequence omitted]

SEQ ID NO: 8456 - protein, 124 aa, synthetic construct
QVQLVESGGGVVQPGRSLRLSCAASGFAFSSYGMHWVRQAPGKGLEWVAVIWFDGTKKYYTDSVKGRFTISRDNSKNTLYLQMNTLRAEDTAVYYCARDRGIGARRGPYYMDVWGKGTTVTVSS

SEQ ID NO: 8457 - protein, 6 aa, synthetic construct
QSISSY

SEQ ID NO: 8458 - skipped

SEQ ID NO: 8459 - protein, 9 aa, synthetic construct
QQSYSTPLT

SEQ ID NO: 8460 - protein, 8 aa, synthetic construct
GFAFSSYG

SEQ ID NO: 8461 - protein, 8 aa, synthetic construct
IWFDGTKK

SEQ ID NO: 8462 - protein, 17 aa, synthetic construct
ARDRGIGARRGPYYMDV

SEQ ID NO: 8463 - protein, 112 aa, synthetic construct
DIVMTQTPLSLSVTPGQPASISCKSSQSLLYSRGKTYLNWLLQKPGQSPQLLIYAVSKLDSGVPDRFSGSGSGTDFTLKISRVEAEDVGVYYCVQGTHYPFTFGQGTKLEIK

SEQ ID NO: 8464 - protein, 115 aa, synthetic construct
QVQLVQSGAEVKKPGSSVKVSCKASGYDFTRYYINWVRQAPGQGLEWMGWINPGSGNTKYNEKFKGRVTITADESTSTAYMELSSLRSEDTAVYYCAREGITVYWGQGTTVTVSS

SEQ ID NO: 8465 - protein, 11 aa, synthetic construct
QSLLYSRGKTY

SEQ ID NO: 8466 - skipped

SEQ ID NO: 8467 - protein, 9 aa, synthetic construct
VQGTHYPFT

SEQ ID NO: 8468 - protein, 8 aa, synthetic construct
GYDFTRYY

SEQ ID NO: 8469 - protein, 8 aa, synthetic construct
INPGSGNT

SEQ ID NO: 8470 - protein, 8 aa, synthetic construct
AREGITVY

SEQ ID NO: 8471 - protein, 108 aa, synthetic construct
EIVMTQSPATLSVSPGERATLSCRASQSVSSNLAWYQQKPGQAPRLLIYGASTRATGIPARFSGSGSGTEFTLTISSLQSEDFAVYYCQQLILWPPRTFGGGTKVEIK

SEQ ID NO: 8472 - protein, 120 aa, synthetic construct
EVQLVQSGAEVKKPGSSVKVSCKASGGTLSGYGVSWVRQAPGQGLEWMGNIIPGFGTANYAQKFQGRVTITADESTSTAYMELSSLRSEDTAVYYCARSGGTKYGMLDVWGQGTMVTVSS

SEQ ID NO: 8473 - protein, 6 aa, synthetic construct
QSVSSN

SEQ ID NO: 8474 - skipped

SEQ ID NO: 8475 - protein, 10 aa, synthetic construct
QQLILWPPRT

SEQ ID NO: 8476 - protein, 8 aa, synthetic construct
GGTLSGYG

SEQ ID NO: 8477 - protein, 8 aa, synthetic construct
IIPGFGTA

SEQ ID NO: 8478 - protein, 13 aa, synthetic construct
ARSGGTKYGMLDV

SEQ ID NO: 8479 - protein, 107 aa, synthetic construct
DIQMTQSPSSLSASVGDRVTITCRASQDVSTAVAWYQQKPGKAPKLLIYSASFLYSGVPSRFSGSGSGTDFTLTISSLQPEDFATYYCQQFPTYLPTFGQGTKVEIK

SEQ ID NO: 8480 - protein, 119 aa, synthetic construct
EVQLVESGGGLVQPGGSLRLSCAASGFTFLGYGIHWVRQAPGKGLEWVGWISPAGGSTDYADSVKGRFTISADTSKNTAYLQMRSLRAEDTAVYYCARGPPSPWVMDYWGQGTLVTVSS

SEQ ID NO: 8481 - protein, 6 aa, synthetic construct
QDVSTA

SEQ ID NO: 8482 - skipped

SEQ ID NO: 8483 - protein, 9 aa, synthetic construct
QQFPTYLPT

SEQ ID NO: 8484 - protein, 8 aa, synthetic construct
GFTFLGYG

SEQ ID NO: 8485 - protein, 8 aa, synthetic construct
ISPAGGST

SEQ ID NO: 8486 - protein, 12 aa, synthetic construct
ARGPPSPWVMDY

SEQ ID NO: 8487 - protein, 451 aa, synthetic construct
QVQLQQPGAELVKPGASVKMSCKASGYTFTSYNMHWVKQTPGRGLEWIGAIYPGNGDTSYNQKFKGKATLTADKSSSTAYMQLSSLTSEDSAVYYCARSTYYGGDWYFNVWGAGTTVTVSAASTKGPSVFPLAPSSKSTSGGTAALGCLVKDYFPEPVTVSWNSGALTSGVHTFPAVLQSSGLYSLSSVVTVPSSSLGTQTYICNVNHKPSNTKVDKKAEPKSCDKTHTCPPCPAPELLGGPSVFLFPPKPKDTLMISRTPEVTCVVVDVSHEDPEVKFNWYVDGVEVHNAKTKPREEQYNSTYRVVSVLTVLHQDWLNGKEYKCKVSNKALPAPIEKTISKAKGQPREPQVYTLPPSRDELTKNQVSLTCLVKGFYPSDIAVEWESNGQPENNYKTTPPVLDSDGSFFLYSKLTVDKSRWQQGNVFSCSVMHEALHNHYTQKSLSLSPGK

SEQ ID NO: 8488 - protein, 213 aa, synthetic construct
QIVLSQSPAILSASPGEKVTMTCRASSSVSYIHWFQQKPGSSPKPWIYATSNLASGVPVRFSGSGSGTSYSLTISRVEAEDAATYYCQQWTSNPPTFGGGTKLEIKRTVAAPSVFIFPPSDEQLKSGTASVVCLLNNFYPREAKVQWKVDNALQSGNSQESVTEQDSKDSTYSLSSTLTLSKADYEKHKVYACEVTHQGLSSPVTKSFNRGEC

SEQ ID NO: 8489 - protein, 452 aa, synthetic construct
EVQLVESGGGLVQPGGSLRLSCAASGYTFTSYNMHWVRQAPGKGLEWVGAIYPGNGDTSYNQKFKGRFTISVDKSKNTLYLQMNSLRAEDTAVYYCARVVYYSNSYWYFDVWGQGTLVTVSSASTKGPSVFPLAPSSKSTSGGTAALGCLVKDYFPEPVTVSWNSGALTSGVHTFPAVLQSSGLYSLSSVVTVPSSSLGTQTYICNVNHKPSNTKVDKKVEPKSCDKTHTCPPCPAPELLGGPSVFLFPPKPKDTLMISRTPEVTCVVVDVSHEDPEVKFNWYVDGVEVHNAKTKPREEQYNSTYRVVSVLTVLHQDWLNGKEYKCKVSNKALPAPIEKTISKAKGQPREPQVYTLPPSREEMTKNQVSLTCLVKGFYPSDIAVEWESNGQPENNYKTTPPVLDSDGSFFLYSKLTVDKSRWQQGNVFSCSVMHEALHNHYTQKSLSLSPGK

SEQ ID NO: 8490 - protein, 213 aa, synthetic construct
DIQMTQSPSSLSASVGDRVTITCRASSSVSYMHWYQQKPGKAPKPLIYAPSNLASGVPSRFSGSGSGTDFTLTISSLQPEDFATYYCQQWSFNPPTFGQGTKVEIKRTVAAPSVFIFPPSDEQLKSGTASVVCLLNNFYPREAKVQWKVDNALQSGNSQESVTEQDSKDSTYSLSSTLTLSKADYEKHKVYACEVTHQGLSSPVTKSFNRGEC

SEQ ID NO: 8491 - protein, 452 aa, synthetic construct
EVQLVESGGGLVQPGRSLRLSCAASGFTFNDYAMHWVRQAPGKGLEWVSTISWNSGSIGYADSVKGRFTISRDNAKKSLYLQMNSLRAEDTALYYCAKDIQYGNYYYGMDVWGQGTTVTVSSASTKGPSVFPLAPSSKSTSGGTAALGCLVKDYFPEPVTVSWNSGALTSGVHTFPAVLQSSGLYSLSSVVTVPSSSLGTQTYICNVNHKPSNTKVDKRVEPKSCDKTHTCPPCPAPELLGGPSVFLFPPKPKDTLMISRTPEVTCVVVDVSHEDPEVKFNWYVDGVEVHNAKTKPREEQYNSTYRVVSVLTVLHQDWLNGKEYKCKVSNKALPAPIEKTISKAKGQPREPQVYTLPPSREEMTKNQVSLTCLVKGFYPSDIAVEWESNGQPENNYKTTPPVLDSDGSFFLYSKLTVDKSRWQQGNVFSCSVMHEALHNHYTQKSLSLSPGK

SEQ ID NO: 8492 - protein, 214 aa, synthetic construct
EIVLTQSPATLSLSPGERATLSCRASQSVSSYLAWYQQKPGQAPRLLIYDASNRATGIPARFSGSGSGTDFTLTISSLEPEDFAVYYCQQRSNWPITFGQGTRLEIKRTVAAPSVFIFPPSDEQLKSGTASVVCLLNNFYPREAKVQWKVDNALQSGNSQESVTEQDSKDSTYSLSSTLTLSKADYEKHKVYACEVTHQGLSSPVTKSFNRGEC

SEQ ID NO: 8493 - protein, 448 aa, synthetic construct
QAYLQQSGAELVRPGASVKMSCKASGYTFTSYNMHWVKQTPRQGLEWIGGIYPGNGDTSYNQKFKGKATLTVGKSSSTAYMQLSSLTSEDSAVYFCARYDYNYAMDYWGQGTSVTVSSASTKGPSVFPLAPSSKSTSGGTAALGCLVKDYFPEPVTVSWNSGALTSGVHTFPAVLQSSGLYSLSSVVTVPSSSLGTQTYICNVNHKPSNTKVDKKVEPKSCDKTHTCPPCPAPELLGGPSVFLFPPKPKDTLMISRTPEVTCVVVDVSHEDPEVKFNWYVDGVEVHNAKTKPREEQYNSTYRVVSVLTVLHQDWLNGKEYKCKVSNKALPAPIEKTISKAKGQPREPQVYTLPPSRDELTKNQVSLTCLVKGFYPSDIAVEWESNGQPENNYKTTPPVLDSDGSFFLYSKLTVDKSRWQQGNVFSCSVMHEALHNHYTQKSLSLSPGK

SEQ ID NO: 8494 - protein, 213 aa, synthetic construct
QIVLSQSPAILSASPGEKVTMTCRASSSVSYMHWYQQKPGSSPKPWIYATSNLASGVPARFSGSGSGTSYSFTISRVEAEDAATYYCQQWTFNPPTFGGGTRLEIKRTVAAPSVFIFPPSDEQLKSGTASVVCLLNNFYPREAKVQWKVDNALQSGNSQESVTEQDSKDSTYSLSSTLTLSKADYEKHKVYACEVTHQGLSSPVTKSFNRGEC

SEQ ID NO: 8495 - protein, 449 aa, synthetic construct
QVQLVQSGAEVKKPGSSVKVSCKASGYAFSYSWINWVRQAPGQGLEWMGRIFPGDGDTDYNGKFKGRVTITADKSTSTAYMELSSLRSEDTAVYYCARNVFDGYWLVYWGQGTLVTVSSASTKGPSVFPLAPSSKSTSGGTAALGCLVKDYFPEPVTVSWNSGALTSGVHTFPAVLQSSGLYSLSSVVTVPSSSLGTQTYICNVNHKPSNTKVDKKVEPKSCDKTHTCPPCPAPELLGGPSVFLFPPKPKDTLMISRTPEVTCVVVDVSHEDPEVKFNWYVDGVEVHNAKTKPREEQYNSTYRVVSVLTVLHQDWLNGKEYKCKVSNKALPAPIEKTISKAKGQPREPQVYTLPPSRDELTKNQVSLTCLVKGFYPSDIAVEWESNGQPENNYKTTPPVLDSDGSFFLYSKLTVDKSRWQQGNVFSCSVMHEALHNHYTQKSLSLSPGK

SEQ ID NO: 8496 - protein, 219 aa, synthetic construct
DIVMTQTPLSLPVTPGEPASISCRSSKSLLHSNGITYLYWYLQKPGQSPQLLIYQMSNLVSGVPDRFSGSGSGTDFTLKISRVEAEDVGVYYCAQNLELPYTFGGGTKVEIKRTVAAPSVFIFPPSDEQLKSGTASVVCLLNNFYPREAKVQWKVDNALQSGNSQESVTEQDSKDSTYSLSSTLTLSKADYEKHKVYACEVTHQGLSSPVTKSFNRGEC

SEQ ID NO: 8497 - protein, 453 aa, synthetic construct
QVQLVESGGGVVQPGRSLRLSCAASGFAFSSYGMHWVRQAPGKGLEWVAVIWFDGTKKYYTDSVKGRFTISRDNSKNTLYLQMNTLRAEDTAVYYCARDRGIGARRGPYYMDVWGKGTTVTVSSASTKGPSVFPLAPSSKSTSGGTAALGCLVKDYFPEPVTVSWNSGALTSGVHTFPAVLQSSGLYSLSSVVTVPSSSLGTQTYICNVNHKPSNTKVDKRVEPKSCDKTHTCPPCPAPELLGGPSVFLFPPKPKDTLMISRTPEVTCVVVDVSHEDPEVKFNWYVDGVEVHNAKTKPREEQYNSTYRVVSVLTVLHQDWLNGKEYKCKVSNKALPAPIEKTISKAKGQPREPQVYTLPPSREEMTKNQVSLTCLVKGFYPSDIAVEWESNGQPENNYKTTPPVLDSDGSFFLYSKLTVDKSRWQQGNVFSCSVMHEALHNHYTQKSLSLSPG

SEQ ID NO: 8498 - protein, 214 aa, synthetic construct
DIQMTQSPSSLSASVGDRVTITCRASQSISSYLNWYQQKPGKAPKLLIYAASSLQSGVPSRFSGSGSGTDFTLTISSLQPEDFATYYCQQSYSTPLTFGGGTKVEIKRTVAAPSVFIFPPSDEQLKSGTASVVCLLNNFYPREAKVQWKVDNALQSGNSQESVTEQDSKDSTYSLSSTLTLSKADYEKHKVYACEVTHQGLSSPVTKSFNRGEC

SEQ ID NO: 8499 - protein, 454 aa, synthetic construct
EVQLVESGGGLVQPGGSLRLSCSASGFTFSSFGMHWVRQAPGKGLEWVAYISSGSSTIYYGDTVKGRFTISRDNAKNSLFLQMSSLRAEDTAVYYCAREGGYYYGRSYYTMDYWGQGTTVTVSSASTKGPSVFPLAPSSKSTSGGTAALGCLVKDYFPEPVTVSWNSGALTSGVHTFPAVLQSSGLYSLSSVVTVPSSSLGTQTYICNVNHKPSNTKVDKRVEPKSCDKTHTCPPCPAPELLGGPSVFLFPPKPKDTLMISRTPEVTCVVVDVSHEDPEVKFNWYVDGVEVHNAKTKPREEQYNSTYRVVSVLTVLHQDWLNGKEYKCKVSNKALPAPIEKTISKAKGQPREPQVYTLPPSREEMTKNQVSLTCLVKGFYPSDIAVEWESNGQPENNYKTTPPVLDSDGSFFLYSKLTVDKSRWQQGNVFSCSVMHEALHNHYTQKSLSLSPGK

SEQ ID NO: 8500 - protein, 219 aa, synthetic construct
DVVMTQSPLSLPVTPGAPASISCRSSQSIVHSNGNTYLEWYLQKPGQSPKLLIYKVSNRFSGVPDRFSGSGSGTDFTLRISRVEAEDVGIYYCFQGSHVPPTFGPGTKLEIKRTVAAPSVFIFPPSDEQLKSGTASVVCLLNNFYPREAKVQWKVDNALQSGNSQESVTEQDSKDSTYSLSSTLTLSKADYEKHKVYACEVTHQGLSSPVTKSFNRGEC

SEQ ID NO: 8501 - protein, 456 aa, synthetic construct
QVELVESGGGLVQPGGSLRLSCAASGFTFSSYAMSWVRQAPGKGLEWVSAINASGTRTYYADSVKGRFTISRDNSKNTLYLQMNSLRAEDTAVYYCARGKGNTHKPYGYVRYFDVWGQGTLVTVSSASTKGPSVFPLAPSSKSTSGGTAALGCLVKDYFPEPVTVSWNSGALTSGVHTFPAVLQSSGLYSLSSVVTVPSSSLGTQTYICNVNHKPSNTKVDKKVEPKSCDKTHTCPPCPAPELLGGPSVFLFPPKPKDTLMISRTPEVTCVVVDVSHEDPEVKFNWYVDGVEVHNAKTKPREEQYNSTYRVVSVLTVLHQDWLNGKEYKCKVSNKALPAPIEKTISKAKGQPREPQVYTLPPSRDELTKNQVSLTCLVKGFYPSDIAVEWESNGQPENNYKTTPPVLDSDGSFFLYSKLTVDKSRWQQGNVFSCSVMHEALHNHYTQKSLSLSPGK

SEQ ID NO: 8502 - protein, 215 aa, synthetic construct
DIVLTQSPATLSLSPGERATLSCRASQSVSSSYLAWYQQKPGQAPRLLIYGASSRATGVPARFSGSGSGTDFTLTISSLEPEDFATYYCLQIYNMPITFGQGTKVEIKRTVAAPSVFIFPPSDEQLKSGTASVVCLLNNFYPREAKVQWKVDNALQSGNSQESVTEQDSKDSTYSLSSTLTLSKADYEKHKVYACEVTHQGLSSPVTKSFNRGEC

SEQ ID NO: 8503 - protein, 444 aa, synthetic construct
QVQLVQSGAEVKKPGSSVKVSCKASGYDFTRYYINWVRQAPGQGLEWMGWINPGSGNTKYNEKFKGRVTITADESTSTAYMELSSLRSEDTAVYYCAREGITVYWGQGTTVTVSSASTKGPSVFPLAPSSKSTSGGTAALGCLVKDYFPEPVTVSWNSGALTSGVHTFPAVLQSSGLYSLSSVVTVPSSSLGTQTYICNVNHKPSNTKVDKKVEPKSCDKTHTCPPCPAPELLGGPSVFLFPPKPKDTLMISRTPEVTCVVVDVSHEDPEVKFNWYVDGVEVHNAKTKPREEQYNSTYRVVSVLTVLHQDWLNGKEYKCKVSNKALPAPIEKTISKAKGQPREPQVYTLPPSRDELTKNQVSLTCLVKGFYPSDIAVEWESNGQPENNYKTTPPVLDSDGSFFLYSKLTVDKSRWQQGNVFSCSVMHEALHNHYTQKSLSLSPG

SEQ ID NO: 8504 - protein, 219 aa, synthetic construct
DIVMTQTPLSLSVTPGQPASISCKSSQSLLYSRGKTYLNWLLQKPGQSPQLLIYAVSKLDSGVPDRFSGSGSGTDFTLKISRVEAEDVGVYYCVQGTHYPFTFGQGTKLEIKRTVAAPSVFIFPPSDEQLKSGTASVVCLLNNFYPREAKVQWKVDNALQSGNSQESVTEQDSKDSTYSLSSTLTLSKADYEKHKVYACEVTHQGLSSPVTKSFNRGEC

SEQ ID NO: 8505 - protein, 446 aa, synthetic construct
EVQLVESGGGLVQPGGSLRLSCAASGFTFSNYGMSWVRQAPGKGLEWVASISSGGGSTYYPDNVKGRFTISRDDAKNSLYLQMNSLRAEDTAVYYCARGGAGIDYWGQGTLVTVSSASTKGPSVFPLAPSSKSTSGGTAALGCLVKDYFPEPVTVSWNSGALTSGVHTFPAVLQSSGLYSLSSVVTVPSSSLGTQTYICNVNHKPSNTKVDKRVEPKSCDKTHTCPPCPAPELLGGPSVFLFPPKPKDTLMISRTPEVTCVVVDVSHEDPEVKFNWYVDGVEVHNAKTKPREEQYNSTYRVVSVLTVLHQDWLNGKEYKCKVSNKALPAPIEKTISKAKGQPREPQVYTLPPSREEMTKNQVSLTCLVKGFYPSDIAVEWESNGQPENNYKTTPPVLDSDGSFFLYSKLTVDKSRWQQGNVFSCSVMHEALHNHYTQKSLSLSPGK

SEQ ID NO: 8506 - protein, 220 aa, synthetic construct
DIQMTQSPSSLSASVGDRVTITCKSIQTLLYSSNQKNYLAWFQQKPGKAPKLLIYWASIRKSGVPSRFSGSGSGTDFTLTISSLQPEDLATYYCQQYYSYPLTFGGGTKLEIKRTVAAPSVFIFPPSDEQLKSGTASVVCLLNNFYPREAKVQWKVDNALQSGNSQESVTEQDSKDSTYSLSSTLTLSKADYEKHKVYACEVTHQGLSSPVTKSFNRGEC

SEQ ID NO: 8507 - protein, 446 aa, synthetic construct
EVQLLESGGGLVQTGGSLRLSCAASGFTFSSYAMTWVRQAPGKGLEWVSAIRSQGDRTDYADSVKGRFTISRDNSQNTLYLQMNSLRAEDTAVYYCAKNWAPFDSWGQGTLVTVSSASTKGPSVFPLAPSSKSTSGGTAALGCLVKDYFPEPVTVSWNSGALTSGVHTFPAVLQSSGLYSLSSVVTVPSSSLGTQTYICNVNHKPSNTKVDKRVEPKSCDKTHTCPPCPAPELLGGPSVFLFPPKPKDTLMISRTPEVTCVVVDVSHEDPEVKFNWYVDGVEVHNAKTKPREEQYNSTYRVVSVLTVLHQDWLNGKEYKCKVSNKALPAPIEKTISKAKGQPREPQVYTLPPSREEMTKNQVSLTCLVKGFYPSDIAVEWESNGQPENNYKTTPPVLDSDGSFFLYSKLTVDKSRWQQGNVFSCSVMHEALHNHYTQKSLSLSPGK

SEQ ID NO: 8508 - protein, 215 aa, synthetic construct
EIVLTQSPGTLSLSPGERATLSCRASQSVSSSYLAWYQQKPGQAPRLLIYGASSRATGIPDRFSGSGSGTDFTLTISRLEPEDFAVYYCQQYGSSPWTFGQGTKVEIKRTVAAPSVFIFPPSDEQLKSGTASVVCLLNNFYPREAKVQWKVDNALQSGNSQESVTEQDSKDSTYSLSSTLTLSKADYEKHKVYACEVTHQGLSSPVTKSFNRGEC

SEQ ID NO: 8509 - protein, 17 aa, synthetic construct
SISHLGGSTYYADSVKG

SEQ ID NO: 8510 - protein, 14 aa, synthetic construct
TLRSGAPLPKYRIY

SEQ ID NO: 8511 - protein, 15 aa, synthetic construct
AGGANHGKYYYGMDV

SEQ ID NO: 8512 - protein, 9 aa, synthetic construct
MVWDHGVWY

SEQ ID NO: 8513 - DNA, 1746 bp, synthetic construct
  source 1..1746: mol_type = other DNA
gaggtgcaactggtagagagcggcgggggcttagtccagcctgggggctccctccggctgtcttgttccgcaagcggattcactttttcatccttcggcatgcactgggtcagacaagctccgggcaaaggacttgaatgggtggcatatatcagctcagggagttccaccatttactacggggacaccgttaaaggcaggttcacgattagtagggataatgccaagaattccctcttcctgcaaatgtctagccttagagccgaggatactgccgtttactactgtgcgcgagaagggggctactactacggacgctcatactacactatggattattggggccaagggacgaccgtaactgtaagctctgcatcaacgaaaggccctagtgtgtttcctctcgcacccagcagtaaaagcacctcagggggtactgctgccctgggctgccttgtgaaagattatttcccggaacctgttactgtgtcttggaatagcggcgctctcacctctggtgttcacacttttccggcagttttgcagtccagcggactttattccctttcatcagtcgtgaccgtcccaagttcctctctgggaacccagacatacatctgcaacgtgaaccacaaaccctctaacactaaggttgataagaaggtggaacctaagagctgcgacaaaacccacacatgtcctccctgtcctgcccctgaactgctgggcgggccttccgtgttcctgtttcctcctaagcctaaggatacactgatgattagcaggacacccgaggtcacctgcgtcgtggtcgacgtctcccacgaggaccctgaagtgaaatttaattggtatgtcgatggagtcgaggtccacaatgccaagaccaaacctagagaggaacaatataattccacatatagagtcgtgtccgtcctcacagtcctccaccaagattggctcaatggcaaagagtataaatgcaaagtgagcaataaggctctgcccgctcccattgaaaaaacaatctccaaagctaagggccaacccagagaaccccaggtgtatacactgccccccagcagagaagagatgaccaaaaaccaggtcagcctgacatgtctcgtgaaaggattctatcctagcgacattgccgtggagtgggagtccaatggccagcctgagaataactataagaccaccccccctgtgctggactccgatggatccttcttcctctacagcaagctgacagtggataaaagcagatggcaacagggaaacgtgttcagctgtagcgtcatgcatgaagccctgcacaatcattatacccaaaaaagcctctccctgtctccaggaggtggtggaggaagcggaggtggcggtagtcaggtgcaactggtcgagtccggcggaggcgtcgtgcaacctggcaggagcctcagactctcctgtgctgctagcggcttttcttttagcaatttcggaatgagctgggtacgacaggcacgcggaaaaggattggagtgggtttcctcaactggatctgacggcactgcgtactatgctgactccgtgaaaggaaggttcactatttctagggataacgcgaagaatacactttatttgcagatgaactctctgcgagctgaggacaccgcggtgtactactgcgccagagccccaagtagacacgggttcgactactggggccaaggaaccctggttacagtcagcagctaatag

SEQ ID NO: 8514 - DNA, 1746 bp, synthetic construct
  source 1..1746: mol_type = other DNA
gaggtgcaactggtagagagcggcgggggcttagtccagcctgggggctccctccggctgtcttgttccgcaagcggattcactttttcatccttcggcatgcactgggtcagacaagctccgggcaaaggacttgaatgggtggcatatatcagctcagggagttccaccatttactacggggacaccgttaaaggcaggttcacgattagtagggataatgccaagaattccctcttcctgcaaatgtctagccttagagccgaggatactgccgtttactactgtgcgcgagaagggggctactactacggacgctcatactacactatggattattggggccaagggacgaccgtaactgtaagctctgcatcaacgaaaggccctagtgtgtttcctctcgcacccagcagtaaaagcacctcagggggtactgctgccctgggctgccttgtgaaagattatttcccggaacctgttactgtgtcttggaatagcggcgctctcacctctggtgttcacacttttccggcagttttgcagtccagcggactttattccctttcatcagtcgtgaccgtcccaagttcctctctgggaacccagacatacatctgcaacgtgaaccacaaaccctctaacactaaggttgataagaaggtggaacctaagagctgcgacaaaacccacacatgtcctccctgtcctgcccctgaactgctgggcgggccttccgtgttcctgtttcctcctaagcctaaggatacactgatgattagcaggacacccgaggtcacctgcgtcgtggtcgacgtctcccacgaggaccctgaagtgaaatttaattggtatgtcgatggagtcgaggtccacaatgccaagaccaaacctagagaggaacaatataattccacatatagagtcgtgtccgtcctcacagtcctccaccaagattggctcaatggcaaagagtataaatgcaaagtgagcaataaggctctgcccgctcccattgaaaaaacaatctccaaagctaagggccaacccagagaaccccaggtgtatacactgccccccagcagagaagagatgaccaaaaaccaggtcagcctgacatgtctcgtgaaaggattctatcctagcgacattgccgtggagtgggagtccaatggccagcctgagaataactataagaccaccccccctgtgctggactccgatggatccttcttcctctacagcaagctgacagtggataaaagcagatggcaacagggaaacgtgttcagctgtagcgtcatgcatgaagccctgcacaatcattatacccaaaaaagcctctccctgtctccaggaggtggtggaggaagcggaggtggcggtagtcaggtgcaactggtcgagtccggcggaggcgtcgtgcaacctggcaggagcctcagactctcctgtgctgctagcggcttcagcttcagcaatttcggcatgagctgggtgcgtcaggcccgagggaaaggcttggaatgggtcagttccatcgggagcgacggacgagcttactacgctgacagcgtgaagggtcggtttactatcagcagagataacgccaagaacactctgtacctgcaaatgaattctctgagggcagaggatactgccgtgtactattgtgccagggcgccttcaaggcacggatttgactactggggccaaggaaccctggttacagtcagcagctaatag

SEQ ID NO: 8515 - DNA, 1746 bp, synthetic construct
  source 1..1746: mol_type = other DNA
gaggtgcaactggtagagagcggcgggggcttagtccagcctgggggctccctccggctgtcttgttccgcaagcggattcactttttcatccttcggcatgcactgggtcagacaagctccgggcaaaggacttgaatgggtggcatatatcagctcagggagttccaccatttactacggggacaccgttaaaggcaggttcacgattagtagggataatgccaagaattccctcttcctgcaaatgtctagccttagagccgaggatactgccgtttactactgtgcgcgagaagggggctactactacggacgctcatactacactatggattattggggccaagggacgaccgtaactgtaagctctgcatcaacgaaaggccctagtgtgtttcctctcgcacccagcagtaaaagcacctcagggggtactgctgccctgggctgccttgtgaaagattatttcccggaacctgttactgtgtcttggaatagcggcgctctcacctctggtgttcacacttttccggcagttttgcagtccagcggactttattccctttcatcagtcgtgaccgtcccaagttcctctctgggaacccagacatacatctgcaacgtgaaccacaaaccctctaacactaaggttgataagaaggtggaacctaagagctgcgacaaaacccacacatgtcctccctgtcctgcccctgaactgctgggcgggccttccgtgttcctgtttcctcctaagcctaaggatacactgatgattagcaggacacccgaggtcacctgcgtcgtggtcgacgtctcccacgaggaccctgaagtgaaatttaattggtatgtcgatggagtcgaggtccacaatgccaagaccaaacctagagaggaacaatataattccacatatagagtcgtgtccgtcctcacagtcctccaccaagattggctcaatggcaaagagtataaatgcaaagtgagcaataaggctctgcccgctcccattgaaaaaacaatctccaaagctaagggccaacccagagaaccccaggtgtatacactgccccccagcagagaagagatgaccaaaaaccaggtcagcctgacatgtctcgtgaaaggattctatcctagcgacattgccgtggagtgggagtccaatggccagcctgagaataactataagaccaccccccctgtgctggactccgatggatccttcttcctctacagcaagctgacagtggataaaagcagatggcaacagggaaacgtgttcagctgtagcgtcatgcatgaagccctgcacaatcattatacccaaaaaagcctctccctgtctccaggaggtggtggaggaagcggaggtggcggtagtcaggtgcaactggtcgagtccggcggaggcgtcgtgcaacctggcaggagcctcagactctcctgtgctgctagcggcttcagcttcagcaatttcggcatgagctgggtgcgtcaggcccgagggaaaggcttggaatgggtcagttccgtagggagcgacggaaccgcttactacgctgacagcgtgaagggtcggtttactatcagcagagataacgccaagaacactctgtacctgcaaatgaattctctgagggcagaggatactgccgtgtactattgtgccagggcgccttcaaggcacggatttgactactggggccaaggaaccctggttacagtcagcagctaatag

SEQ ID NO: 8516 - DNA, 1746 bp, synthetic construct
  source 1..1746: mol_type = other DNA
gaggtgcaactggtagagagcggcgggggcttagtccagcctgggggctccctccggctgtcttgttccgcaagcggattcactttttcatccttcggcatgcactgggtcagacaagctccgggcaaaggacttgaatgggtggcatatatcagctcagggagttccaccatttactacggggacaccgttaaaggcaggttcacgattagtagggataatgccaagaattccctcttcctgcaaatgtctagccttagagccgaggatactgccgtttactactgtgcgcgagaagggggctactactacggacgctcatactacactatggattattggggccaagggacgaccgtaactgtaagctctgcatcaacgaaaggccctagtgtgtttcctctcgcacccagcagtaaaagcacctcagggggtactgctgccctgggctgccttgtgaaagattatttcccggaacctgttactgtgtcttggaatagcggcgctctcacctctggtgttcacacttttccggcagttttgcagtccagcggactttattccctttcatcagtcgtgaccgtcccaagttcctctctgggaacccagacatacatctgcaacgtgaaccacaaaccctctaacactaaggttgataagaaggtggaacctaagagctgcgacaaaacccacacatgtcctccctgtcctgcccctgaactgctgggcgggccttccgtgttcctgtttcctcctaagcctaaggatacactgatgattagcaggacacccgaggtcacctgcgtcgtggtcgacgtctcccacgaggaccctgaagtgaaatttaattggtatgtcgatggagtcgaggtccacaatgccaagaccaaacctagagaggaacaatataattccacatatagagtcgtgtccgtcctcacagtcctccaccaagattggctcaatggcaaagagtataaatgcaaagtgagcaataaggctctgcccgctcccattgaaaaaacaatctccaaagctaagggccaacccagagaaccccaggtgtatacactgccccccagcagagaagagatgaccaaaaaccaggtcagcctgacatgtctcgtgaaaggattctatcctagcgacattgccgtggagtgggagtccaatggccagcctgagaataactataagaccaccccccctgtgctggactccgatggatccttcttcctctacagcaagctgacagtggataaaagcagatggcaacagggaaacgtgttcagctgtagcgtcatgcatgaagccctgcacaatcattatacccaaaaaagcctctccctgtctccaggaggtggtggaggaagcggaggtggcggtagtcaggtgcaactggtcgagtccggcggaggcgtcgtgcaacctggcaggagcctcagactctcctgtgctgctagcggcttcagcttcagcaatttcggcatgagctgggtgcgtcaggcccccgggaaaggcttggaatgggtcagttccaccgggagcgacggaaccgcttactacgctgacagcgtgaagggtcggtttactatcagcagagataacgccaagaacactctgcacctgcaaatgaattctctgagggcagaggatactgccgtgtactattgtgccagggcgccttcaaggcacggatttgactactggggccaaggaaccctggttacagtcagcagctaatag

SEQ ID NO: 8517 - DNA, 1743 bp, synthetic construct
  source 1..1743: mol_type = other DNA
gaggtgcaactggtagagagcggcgggggcttagtccagcctgggggctccctccggctgtcttgttccgcaagcggattcactttttcatccttcggcatgcactgggtcagacaagctccgggcaaaggacttgaatgggtggcatatatcagctcagggagttccaccatttactacggggacaccgttaaaggcaggttcacgattagtagggataatgccaagaattccctcttcctgcaaatgtctagccttagagccgaggatactgccgtttactactgtgcgcgagaagggggctactactacggacgctcatactacactatggattattggggccaagggacgaccgtaactgtaagctctgcatcaacgaaaggccctagtgtgtttcctctcgcacccagcagtaaaagcacctcagggggtactgctgccctgggctgccttgtgaaagattatttcccggaacctgttactgtgtcttggaatagcggcgctctcacctctggtgttcacacttttccggcagttttgcagtccagcggactttattccctttcatcagtcgtgaccgtcccaagttcctctctgggaacccagacatacatctgcaacgtgaaccacaaaccctctaacactaaggttgataagaaggtggaacctaagagctgcgacaaaacccacacatgtcctccctgtcctgcccctgaactgctgggcgggccttccgtgttcctgtttcctcctaagcctaaggatacactgatgattagcaggacacccgaggtcacctgcgtcgtggtcgacgtctcccacgaggaccctgaagtgaaatttaattggtatgtcgatggagtcgaggtccacaatgccaagaccaaacctagagaggaacaatataattccacatatagagtcgtgtccgtcctcacagtcctccaccaagattggctcaatggcaaagagtataaatgcaaagtgagcaataaggctctgcccgctcccattgaaaaaacaatctccaaagctaagggccaacccagagaaccccaggtgtatacactgccccccagcagagaagagatgaccaaaaaccaggtcagcctgacatgtctcgtgaaaggattctatcctagcgacattgccgtggagtgggagtccaatggccagcctgagaataactataagaccaccccccctgtgctggactccgatggatccttcttcctctacagcaagctgacagtggataaaagcagatggcaacagggaaacgtgttcagctgtagcgtcatgcatgaagccctgcacaatcattatacccaaaaaagcctctccctgtctccaggaggtggtggaggaagcggaggtggcggtagtcaggtgcaactggtcgagtccggcggaggcgtcgtgcaacctggcaggagcctcagactctcctgtgctgctagcggcttcgctgtcgatgctagcgatatgggctggttccgccaagccccaggcaaaggacgagaactggtctcatctatctccagcgataacgacacctattacgcagacagcgtggagggacgcttcaccattagtcgtgacaatgctaagcggatggtctacctgcagatgaattcactgagggctgaagatacagctgtgtactactgcgctagcggtagatttctggagcctgattactggggccaaggaaccctggttacagtcagcagctaatag

SEQ ID NO: 8518 - DNA, 1746 bp, synthetic construct
  source 1..1746: mol_type = other DNA
gaggtgcaactggtagagagcggcgggggcttagtccagcctgggggctccctccggctgtcttgttccgcaagcggattcactttttcatccttcggcatgcactgggtcagacaagctccgggcaaaggacttgaatgggtggcatatatcagctcagggagttccaccatttactacggggacaccgttaaaggcaggttcacgattagtagggataatgccaagaattccctcttcctgcaaatgtctagccttagagccgaggatactgccgtttactactgtgcgcgagaagggggctactactacggacgctcatactacactatggattattggggccaagggacgaccgtaactgtaagctctgcatcaacgaaaggccctagtgtgtttcctctcgcacccagcagtaaaagcacctcagggggtactgctgccctgggctgccttgtgaaagattatttcccggaacctgttactgtgtcttggaatagcggcgctctcacctctggtgttcacacttttccggcagttttgcagtccagcggactttattccctttcatcagtcgtgaccgtcccaagttcctctctgggaacccagacatacatctgcaacgtgaaccacaaaccctctaacactaaggttgataagaaggtggaacctaagagctgcgacaaaacccacacatgtcctccctgtcctgcccctgaactgctgggcgggccttccgtgttcctgtttcctcctaagcctaaggatacactgatgattagcaggacacccgaggtcacctgcgtcgtggtcgacgtctcccacgaggaccctgaagtgaaatttaattggtatgtcgatggagtcgaggtccacaatgccaagaccaaacctagagaggaacaatataattccacatatagagtcgtgtccgtcctcacagtcctccaccaagattggctcaatggcaaagagtataaatgcaaagtgagcaataaggctctgcccgctcccattgaaaaaacaatctccaaagctaagggccaacccagagaaccccaggtgtatacactgccccccagcagagaagagatgaccaaaaaccaggtcagcctgacatgtctcgtgaaaggattctatcctagcgacattgccgtggagtgggagtccaatggccagcctgagaataactataagaccaccccccctgtgctggactccgatggatccttcttcctctacagcaagctgacagtggataaaagcagatggcaacagggaaacgtgttcagctgtagcgtcatgcatgaagccctgcacaatcattatacccaaaaaagcctctccctgtctccaggaggtggtggaggaagcggaggtggcggtagtcaggtgcaactggtcgagtccggcggaggcgtcgtgcaacctggcaggagcctcagactctcctgtgctgctagcggcttcacctttgacgactcagacatgggttggtttaggcaggctcctggtaaaggccgggagctggtcgctgctatcaacacaggaggaggaaagacctactatgctgcaacagtcgaaggacggtttacaatatccagggataacgccaagcgcatggtgtatttgcagatgaactcccttagagctgaggacaccgcagtatactattgcgcctcagggcgatttttagaacccgactactggggccaaggaaccctggttacagtcagcagctaatag

SEQ ID NO: 8519 - DNA, 1749 bp, synthetic construct
  source 1..1749: mol_type = other DNA
gaggtgcaactggtagagagcggcgggggcttagtccagcctgggggctccctccggctgtcttgttccgcaagcggattcactttttcatccttcggcatgcactgggtcagacaagctccgggcaaaggacttgaatgggtggcatatatcagctcagggagttccaccatttactacggggacaccgttaaaggcaggttcacgattagtagggataatgccaagaattccctcttcctgcaaatgtctagccttagagccgaggatactgccgtttactactgtgcgcgagaagggggctactactacggacgctcatactacactatggattattggggccaagggacgaccgtaactgtaagctctgcatcaacgaaaggccctagtgtgtttcctctcgcacccagcagtaaaagcacctcagggggtactgctgccctgggctgccttgtgaaagattatttcccggaacctgttactgtgtcttggaatagcggcgctctcacctctggtgttcacacttttccggcagttttgcagtccagcggactttattccctttcatcagtcgtgaccgtcccaagttcctctctgggaacccagacatacatctgcaacgtgaaccacaaaccctctaacactaaggttgataagaaggtggaacctaagagctgcgacaaaacccacacatgtcctccctgtcctgcccctgaactgctgggcgggccttccgtgttcctgtttcctcctaagcctaaggatacactgatgattagcaggacacccgaggtcacctgcgtcgtggtcgacgtctcccacgaggaccctgaagtgaaatttaattggtatgtcgatggagtcgaggtccacaatgccaagaccaaacctagagaggaacaatataattccacatatagagtcgtgtccgtcctcacagtcctccaccaagattggctcaatggcaaagagtataaatgcaaagtgagcaataaggctctgcccgctcccattgaaaaaacaatctccaaagctaagggccaacccagagaaccccaggtgtatacactgccccccagcagagaagagatgaccaaaaaccaggtcagcctgacatgtctcgtgaaaggattctatcctagcgacattgccgtggagtgggagtccaatggccagcctgagaataactataagaccaccccccctgtgctggactccgatggatccttcttcctctacagcaagctgacagtggataaaagcagatggcaacagggaaacgtgttcagctgtagcgtcatgcatgaagccctgcacaatcattatacccaaaaaagcctctccctgtctccaggaggtggtggaggaagcggaggtggcggtagtcaggtgcaactggtcgagtccggcggaggcgtcgtgcaacctggcaggagcctcagactctcctgtgctgctagcggcctgacattcgatgatagcgatatggggtggtttcgccaggctcctggtaaagagcgtgaaagagtatccactatatctagtgacggtaccccacactatgatgactcagtcaaaggccgctttaccattagcagagacaatagcaaaaatactctgtaccttcagatgaattcacttcgagcggaagacactgccgtgtactactgtgcaagacgcgatggtggcagctggaatttcgactattggggccaaggaaccctggttacagtcagcagctaatag

SEQ ID NO: 8520 - DNA, 1746 bp, synthetic construct
  source 1..1746: mol_type = other DNA
gaggtgcaactggtagagagcggcgggggcttagtccagcctgggggctccctccggctgtcttgttccgcaagcggattcactttttcatccttcggcatgcactgggtcagacaagctccgggcaaaggacttgaatgggtggcatatatcagctcagggagttccaccatttactacggggacaccgttaaaggcaggttcacgattagtagggataatgccaagaattccctcttcctgcaaatgtctagccttagagccgaggatactgccgtttactactgtgcgcgagaagggggctactactacggacgctcatactacactatggattattggggccaagggacgaccgtaactgtaagctctgcatcaacgaaaggccctagtgtgtttcctctcgcacccagcagtaaaagcacctcagggggtactgctgccctgggctgccttgtgaaagattatttcccggaacctgttactgtgtcttggaatagcggcgctctcacctctggtgttcacacttttccggcagttttgcagtccagcggactttattccctttcatcagtcgtgaccgtcccaagttcctctctgggaacccagacatacatctgcaacgtgaaccacaaaccctctaacactaaggttgataagaaggtggaacctaagagctgcgacaaaacccacacatgtcctccctgtcctgcccctgaactgctgggcgggccttccgtgttcctgtttcctcctaagcctaaggatacactgatgattagcaggacacccgaggtcacctgcgtcgtggtcgacgtctcccacgaggaccctgaagtgaaatttaattggtatgtcgatggagtcgaggtccacaatgccaagaccaaacctagagaggaacaatataattccacatatagagtcgtgtccgtcctcacagtcctccaccaagattggctcaatggcaaagagtataaatgcaaagtgagcaataaggctctgcccgctcccattgaaaaaacaatctccaaagctaagggccaacccagagaaccccaggtgtatacactgccccccagcagagaagagatgaccaaaaaccaggtcagcctgacatgtctcgtgaaaggattctatcctagcgacattgccgtggagtgggagtccaatggccagcctgagaataactataagaccaccccccctgtgctggactccgatggatccttcttcctctacagcaagctgacagtggataaaagcagatggcaacagggaaacgtgttcagctgtagcgtcatgcatgaagccctgcacaatcattatacccaaaaaagcctctccctgtctccaggaggtggtggaggaagcggaggtggcggtagtcaggtgcaactggtcgagtccggcggaggcgtcgtgcaacctggcaggagcctcagactctcctgtgctgctagcggctttaccttcgatggatccgacattgcatgggtcaggagagccccaggaaaaggagaggagtgggtgagtaccatcagttcagacggcactgtgtactacagtgaccctgtgaagggaagatttacaatctctgctgatacatcaaagaacactgcatatctgcaaatgaacagtcttagggcagaagacaccgcagtgtactactgtgccatcagctcttggtacggcgacttcgactactggggccaaggaaccctggttacagtcagcagctaatag

SEQ ID NO: 8521 - DNA, 1758 bp, synthetic construct
  source 1..1758: mol_type = other DNA
gaggtgcaactggtagagagcggcgggggcttagtccagcctgggggctccctccggctgtcttgttccgcaagcggattcactttttcatccttcggcatgcactgggtcagacaagctccgggcaaaggacttgaatgggtggcatatatcagctcagggagttccaccatttactacggggacaccgttaaaggcaggttcacgattagtagggataatgccaagaattccctcttcctgcaaatgtctagccttagagccgaggatactgccgtttactactgtgcgcgagaagggggctactactacggacgctcatactacactatggattattggggccaagggacgaccgtaactgtaagctctgcatcaacgaaaggccctagtgtgtttcctctcgcacccagcagtaaaagcacctcagggggtactgctgccctgggctgccttgtgaaagattatttcccggaacctgttactgtgtcttggaatagcggcgctctcacctctggtgttcacacttttccggcagttttgcagtccagcggactttattccctttcatcagtcgtgaccgtcccaagttcctctctgggaacccagacatacatctgcaacgtgaaccacaaaccctctaacactaaggttgataagaaggtggaacctaagagctgcgacaaaacccacacatgtcctccctgtcctgcccctgaactgctgggcgggccttccgtgttcctgtttcctcctaagcctaaggatacactgatgattagcaggacacccgaggtcacctgcgtcgtggtcgacgtctcccacgaggaccctgaagtgaaatttaattggtatgtcgatggagtcgaggtccacaatgccaagaccaaacctagagaggaacaatataattccacatatagagtcgtgtccgtcctcacagtcctccaccaagattggctcaatggcaaagagtataaatgcaaagtgagcaataaggctctgcccgctcccattgaaaaaacaatctccaaagctaagggccaacccagagaaccccaggtgtatacactgccccccagcagagaagagatgaccaaaaaccaggtcagcctgacatgtctcgtgaaaggattctatcctagcgacattgccgtggagtgggagtccaatggccagcctgagaataactataagaccaccccccctgtgctggactccgatggatccttcttcctctacagcaagctgacagtggataaaagcagatggcaacagggaaacgtgttcagctgtagcgtcatgcatgaagccctgcacaatcattatacccaaaaaagcctctccctgtctccaggaggtggtggaggaagcggaggtggcggtagtcaggtgcaactggtcgagtccggcggaggcgtcgtgcaacctggcaggagcctcagactctcctgtgctgctagcggccatattctgaattattggtatatgggttgggtaagacgtgctcccggaaaaggagaagagtgggtcgctggcatatccccgggggggaccgtcacggtctatgccgactcagtgaagggaaggttcactataagcagagataattccaagaacactctgtacctccagatgaactcactgagggcagaggatacggctgtgtactactgtgctagaggcggccagggtggtgacgcttgggccttcgactattggggccaaggaaccctggttacagtcagcagctaatag

SEQ ID NO: 8522 - DNA, 1755 bp, synthetic construct
  source 1..1755: mol_type = other DNA
gaggtgcaactggtagagagcggcgggggcttagtccagcctgggggctccctccggctgtcttgttccgcaagcggattcactttttcatccttcggcatgcactgggtcagacaagctccgggcaaaggacttgaatgggtggcatatatcagctcagggagttccaccatttactacggggacaccgttaaaggcaggttcacgattagtagggataatgccaagaattccctcttcctgcaaatgtctagccttagagccgaggatactgccgtttactactgtgcgcgagaagggggctactactacggacgctcatactacactatggattattggggccaagggacgaccgtaactgtaagctctgcatcaacgaaaggccctagtgtgtttcctctcgcacccagcagtaaaagcacctcagggggtactgctgccctgggctgccttgtgaaagattatttcccggaacctgttactgtgtcttggaatagcggcgctctcacctctggtgttcacacttttccggcagttttgcagtccagcggactttattccctttcatcagtcgtgaccgtcccaagttcctctctgggaacccagacatacatctgcaacgtgaaccacaaaccctctaacactaaggttgataagaaggtggaacctaagagctgcgacaaaacccacacatgtcctccctgtcctgcccctgaactgctgggcgggccttccgtgttcctgtttcctcctaagcctaaggatacactgatgattagcaggacacccgaggtcacctgcgtcgtggtcgacgtctcccacgaggaccctgaagtgaaatttaattggtatgtcgatggagtcgaggtccacaatgccaagaccaaacctagagaggaacaatataattccacatatagagtcgtgtccgtcctcacagtcctccaccaagattggctcaatggcaaagagtataaatgcaaagtgagcaataaggctctgcccgctcccattgaaaaaacaatctccaaagctaagggccaacccagagaaccccaggtgtatacactgccccccagcagagaagagatgaccaaaaaccaggtcagcctgacatgtctcgtgaaaggattctatcctagcgacattgccgtggagtgggagtccaatggccagcctgagaataactataagaccaccccccctgtgctggactccgatggatccttcttcctctacagcaagctgacagtggataaaagcagatggcaacagggaaacgtgttcagctgtagcgtcatgcatgaagccctgcacaatcattatacccaaaaaagcctctccctgtctccaggaggtggtggaggaagcggaggtggcggtagtcaggtgcaactggtcgagtccggcggaggcgtcgtgcaacctggcaggagcctcagactctcctgtgctgctagcggcttcggcgtggcctcaagcgacatgggttggttcaggcaggcccctggaaagggaagggagctggtggccagtattaatactgacgggtcaacgatctacgcggagtctgtggagggcaggttcaccatctcaagagacaacgccaagaggatggtctacctccagatgaactctttgcgggccgaagatactgctgtgtattactgcgccgcatacgataccagcgcataccactctcctttcgactactggggccaaggaaccctggttacagtcagcagctaatag

SEQ ID NO: 8523 - DNA, 1752 bp, synthetic construct
  source 1..1752: mol_type = other DNA
gaggtgcaactggtagagagcggcgggggcttagtccagcctgggggctccctccggctgtcttgttccgcaagcggattcactttttcatccttcggcatgcactgggtcagacaagctccgggcaaaggacttgaatgggtggcatatatcagctcagggagttccaccatttactacggggacaccgttaaaggcaggttcacgattagtagggataatgccaagaattccctcttcctgcaaatgtctagccttagagccgaggatactgccgtttactactgtgcgcgagaagggggctactactacggacgctcatactacactatggattattggggccaagggacgaccgtaactgtaagctctgcatcaacgaaaggccctagtgtgtttcctctcgcacccagcagtaaaagcacctcagggggtactgctgccctgggctgccttgtgaaagattatttcccggaacctgttactgtgtcttggaatagcggcgctctcacctctggtgttcacacttttccggcagttttgcagtccagcggactttattccctttcatcagtcgtgaccgtcccaagttcctctctgggaacccagacatacatctgcaacgtgaaccacaaaccctctaacactaaggttgataagaaggtggaacctaagagctgcgacaaaacccacacatgtcctccctgtcctgcccctgaactgctgggcgggccttccgtgttcctgtttcctcctaagcctaaggatacactgatgattagcaggacacccgaggtcacctgcgtcgtggtcgacgtctcccacgaggaccctgaagtgaaatttaattggtatgtcgatggagtcgaggtccacaatgccaagaccaaacctagagaggaacaatataattccacatatagagtcgtgtccgtcctcacagtcctccaccaagattggctcaatggcaaagagtataaatgcaaagtgagcaataaggctctgcccgctcccattgaaaaaacaatctccaaagctaagggccaacccagagaaccccaggtgtatacactgccccccagcagagaagagatgaccaaaaaccaggtcagcctgacatgtctcgtgaaaggattctatcctagcgacattgccgtggagtgggagtccaatggccagcctgagaataactataagaccaccccccctgtgctggactccgatggatccttcttcctctacagcaagctgacagtggataaaagcagatggcaacagggaaacgtgttcagctgtagcgtcatgcatgaagccctgcacaatcattatacccaaaaaagcctctccctgtctccaggaggtggtggaggaagcggaggtggcggtagtcaggtgcaactggtcgagtccggcggaggcgtcgtgcaacctggcaggagcctcagactctcctgtgctgctagcggctacaccttccgctcagccagtatggggtgggttcggagggcccctggcaagggtgaggagtgggtggccgtgatagacagtgagggacatactatctacgctgactctgtaaaagggcggtttactataagcgccgatacctcaaaaaatactgcatatctccagatgaactccctcagagccgaggatactgccgtgtattattgtgcgaaggatatttatggtgactatggcggtcccgactattggggccaaggaaccctggttacagtcagcagctaatag

SEQ ID NO: 8524 - DNA, 1752 bp, synthetic construct
  source 1..1752: mol_type = other DNA
gaggtgcaactggtagagagcggcgggggcttagtccagcctgggggctccctccggctgtcttgttccgcaagcggattcactttttcatccttcggcatgcactgggtcagacaagctccgggcaaaggacttgaatgggtggcatatatcagctcagggagttccaccatttactacggggacaccgttaaaggcaggttcacgattagtagggataatgccaagaattccctcttcctgcaaatgtctagccttagagccgaggatactgccgtttactactgtgcgcgagaagggggctactactacggacgctcatactacactatggattattggggccaagggacgaccgtaactgtaagctctgcatcaacgaaaggccctagtgtgtttcctctcgcacccagcagtaaaagcacctcagggggtactgctgccctgggctgccttgtgaaagattatttcccggaacctgttactgtgtcttggaatagcggcgctctcacctctggtgttcacacttttccggcagttttgcagtccagcggactttattccctttcatcagtcgtgaccgtcccaagttcctctctgggaacccagacatacatctgcaacgtgaaccacaaaccctctaacactaaggttgataagaaggtggaacctaagagctgcgacaaaacccacacatgtcctccctgtcctgcccctgaactgctgggcgggccttccgtgttcctgtttcctcctaagcctaaggatacactgatgattagcaggacacccgaggtcacctgcgtcgtggtcgacgtctcccacgaggaccctgaagtgaaatttaattggtatgtcgatggagtcgaggtccacaatgccaagaccaaacctagagaggaacaatataattccacatatagagtcgtgtccgtcctcacagtcctccaccaagattggctcaatggcaaagagtataaatgcaaagtgagcaataaggctctgcccgctcccattgaaaaaacaatctccaaagctaagggccaacccagagaaccccaggtgtatacactgccccccagcagagaagagatgaccaaaaaccaggtcagcctgacatgtctcgtgaaaggattctatcctagcgacattgccgtggagtgggagtccaatggccagcctgagaataactataagaccaccccccctgtgctggactccgatggatccttcttcctctacagcaagctgacagtggataaaagcagatggcaacagggaaacgtgttcagctgtagcgtcatgcatgaagccctgcacaatcattatacccaaaaaagcctctccctgtctccaggaggtggtggaggaagcggaggtggcggtagtcaggtgcaactggtcgagtccggcggaggcgtcgtgcaacctggcaggagcctcagactctcctgtgctgctagcggcacccgacgtcctaactacgttacatggttcagacaagctccactgaacgagcgacaagtcgtcgccggcattgacagcgccggcaccactacgtacgccgattctgtcaagggcaggttcactatcagccaggataacgcgaaaaacactgtatatctgcagatgaacagtctgcgtgcggaggatacagccgtttactactgtgcttcaggaatttcttcctcatccttctatccattcgactcttggggccaaggaaccctggttacagtcagcagctaatag

SEQ ID NO: 8525 - DNA, 1749 bp, synthetic construct
  source 1..1749: mol_type = other DNA
gaggtgcaactggtagagagcggcgggggcttagtccagcctgggggctccctccggctgtcttgttccgcaagcggattcactttttcatccttcggcatgcactgggtcagacaagctccgggcaaaggacttgaatgggtggcatatatcagctcagggagttccaccatttactacggggacaccgttaaaggcaggttcacgattagtagggataatgccaagaattccctcttcctgcaaatgtctagccttagagccgaggatactgccgtttactactgtgcgcgagaagggggctactactacggacgctcatactacactatggattattggggccaagggacgaccgtaactgtaagctctgcatcaacgaaaggccctagtgtgtttcctctcgcacccagcagtaaaagcacctcagggggtactgctgccctgggctgccttgtgaaagattatttcccggaacctgttactgtgtcttggaatagcggcgctctcacctctggtgttcacacttttccggcagttttgcagtccagcggactttattccctttcatcagtcgtgaccgtcccaagttcctctctgggaacccagacatacatctgcaacgtgaaccacaaaccctctaacactaaggttgataagaaggtggaacctaagagctgcgacaaaacccacacatgtcctccctgtcctgcccctgaactgctgggcgggccttccgtgttcctgtttcctcctaagcctaaggatacactgatgattagcaggacacccgaggtcacctgcgtcgtggtcgacgtctcccacgaggaccctgaagtgaaatttaattggtatgtcgatggagtcgaggtccacaatgccaagaccaaacctagagaggaacaatataattccacatatagagtcgtgtccgtcctcacagtcctccaccaagattggctcaatggcaaagagtataaatgcaaagtgagcaataaggctctgcccgctcccattgaaaaaacaatctccaaagctaagggccaacccagagaaccccaggtgtatacactgccccccagcagagaagagatgaccaaaaaccaggtcagcctgacatgtctcgtgaaaggattctatcctagcgacattgccgtggagtgggagtccaatggccagcctgagaataactataagaccaccccccctgtgctggactccgatggatccttcttcctctacagcaagctgacagtggataaaagcagatggcaacagggaaacgtgttcagctgtagcgtcatgcatgaagccctgcacaatcattatacccaaaaaagcctctccctgtctccaggaggtggtggaggaagcggaggtggcggtagtcaggtgcaactggtcgagtccggcggaggcgtcgtgcaacctggcaggagcctcagactctcctgtgctgctagcggctttaactttgacgacagtgacatggggtggtttcgccaagcgccagggaaaggtagagagttggtctcctcaatcgcatctgacggggcgacatattacgcggactccgtggagggccggtttaccatctcccgggataatgcaaagaggatggtgtacctgcaaatgaattccctccgagctgaagatacagctgtctactactgtgctcgagatagtccgtcattgcgagcctttgactcctggggccaaggaaccctggttacagtcagcagctaatag

SEQ ID NO: 8526 - DNA, 1752 bp, synthetic construct
  source 1..1752: mol_type = other DNA
gaggtgcaactggtagagagcggcgggggcttagtccagcctgggggctccctccggctgtcttgttccgcaagcggattcactttttcatccttcggcatgcactgggtcagacaagctccgggcaaaggacttgaatgggtggcatatatcagctcagggagttccaccatttactacggggacaccgttaaaggcaggttcacgattagtagggataatgccaagaattccctcttcctgcaaatgtctagccttagagccgaggatactgccgtttactactgtgcgcgagaagggggctactactacggacgctcatactacactatggattattggggccaagggacgaccgtaactgtaagctctgcatcaacgaaaggccctagtgtgtttcctctcgcacccagcagtaaaagcacctcagggggtactgctgccctgggctgccttgtgaaagattatttcccggaacctgttactgtgtcttggaatagcggcgctctcacctctggtgttcacacttttccggcagttttgcagtccagcggactttattccctttcatcagtcgtgaccgtcccaagttcctctctgggaacccagacatacatctgcaacgtgaaccacaaaccctctaacactaaggttgataagaaggtggaacctaagagctgcgacaaaacccacacatgtcctccctgtcctgcccctgaactgctgggcgggccttccgtgttcctgtttcctcctaagcctaaggatacactgatgattagcaggacacccgaggtcacctgcgtcgtggtcgacgtctcccacgaggaccctgaagtgaaatttaattggtatgtcgatggagtcgaggtccacaatgccaagaccaaacctagagaggaacaatataattccacatatagagtcgtgtccgtcctcacagtcctccaccaagattggctcaatggcaaagagtataaatgcaaagtgagcaataaggctctgcccgctcccattgaaaaaacaatctccaaagctaagggccaacccagagaaccccaggtgtatacactgccccccagcagagaagagatgaccaaaaaccaggtcagcctgacatgtctcgtgaaaggattctatcctagcgacattgccgtggagtgggagtccaatggccagcctgagaataactataagaccaccccccctgtgctggactccgatggatccttcttcctctacagcaagctgacagtggataaaagcagatggcaacagggaaacgtgttcagctgtagcgtcatgcatgaagccctgcacaatcattatacccaaaaaagcctctccctgtctccaggaggtggtggaggaagcggaggtggcggtagtcaggtgcaactggtcgagtccggcggaggcgtcgtgcaacctggcaggagcctcagactctcctgtgctgctagcggcaccacctattctcgccaatactgtatgggatgggcgaggcaggccccaggtaagggcctggaatgggtcagctgtattgacgacgatgggaatacctattacgccgatagcgttaagggtagatttactatcagcagagataatagtaagaacacactctatctccagatgaattctctgcgcgccgaagatactgcagtgtactactgtgctagagaccctggcctcagcggagactttgattattggggccaaggaaccctggttacagtcagcagctaatag

SEQ ID NO: 8527 - DNA, 1755 bp, synthetic construct
  source 1..1755: mol_type = other DNA
gaggtgcaactggtagagagcggcgggggcttagtccagcctgggggctccctccggctgtcttgttccgcaagcggattcactttttcatccttcggcatgcactgggtcagacaagctccgggcaaaggacttgaatgggtggcatatatcagctcagggagttccaccatttactacggggacaccgttaaaggcaggttcacgattagtagggataatgccaagaattccctcttcctgcaaatgtctagccttagagccgaggatactgccgtttactactgtgcgcgagaagggggctactactacggacgctcatactacactatggattattggggccaagggacgaccgtaactgtaagctctgcatcaacgaaaggccctagtgtgtttcctctcgcacccagcagtaaaagcacctcagggggtactgctgccctgggctgccttgtgaaagattatttcccggaacctgttactgtgtcttggaatagcggcgctctcacctctggtgttcacacttttccggcagttttgcagtccagcggactttattccctttcatcagtcgtgaccgtcccaagttcctctctgggaacccagacatacatctgcaacgtgaaccacaaaccctctaacactaaggttgataagaaggtggaacctaagagctgcgacaaaacccacacatgtcctccctgtcctgcccctgaactgctgggcgggccttccgtgttcctgtttcctcctaagcctaaggatacactgatgattagcaggacacccgaggtcacctgcgtcgtggtcgacgtctcccacgaggaccctgaagtgaaatttaattggtatgtcgatggagtcgaggtccacaatgccaagaccaaacctagagaggaacaatataattccacatatagagtcgtgtccgtcctcacagtcctccaccaagattggctcaatggcaaagagtataaatgcaaagtgagcaataaggctctgcccgctcccattgaaaaaacaatctccaaagctaagggccaacccagagaaccccaggtgtatacactgccccccagcagagaagagatgaccaaaaaccaggtcagcctgacatgtctcgtgaaaggattctatcctagcgacattgccgtggagtgggagtccaatggccagcctgagaataactataagaccaccccccctgtgctggactccgatggatccttcttcctctacagcaagctgacagtggataaaagcagatggcaacagggaaacgtgttcagctgtagcgtcatgcatgaagccctgcacaatcattatacccaaaaaagcctctccctgtctccaggaggtggtggaggaagcggaggtggcggtagtcaggtgcaactggtcgagtccggcggaggcgtcgtgcaacctggcaggagcctcagactctcctgtgctgctagcggcattacctaccgggggccatgcatggggtggtatcgccaggcgcccgggaaagggcttgagtgggttgcgactctcgactctgacgggagcaccacttatgcggattctgtgaaaggacggtttacgatctctagggataacagcaaaaatacactgtatctgcagatgaatagcctccgcgcagaggatactgcggtgtattactgcgcaatgtatatgacaggcggagggggtgtagcatttgattactggggccaaggaaccctggttacagtcagcagctaatag

SEQ ID NO: 8528 - DNA, 1752 bp, synthetic construct
  source 1..1752: mol_type = other DNA
gaggtgcaactggtagagagcggcgggggcttagtccagcctgggggctccctccggctgtcttgttccgcaagcggattcactttttcatccttcggcatgcactgggtcagacaagctccgggcaaaggacttgaatgggtggcatatatcagctcagggagttccaccatttactacggggacaccgttaaaggcaggttcacgattagtagggataatgccaagaattccctcttcctgcaaatgtctagccttagagccgaggatactgccgtttactactgtgcgcgagaagggggctactactacggacgctcatactacactatggattattggggccaagggacgaccgtaactgtaagctctgcatcaacgaaaggccctagtgtgtttcctctcgcacccagcagtaaaagcacctcagggggtactgctgccctgggctgccttgtgaaagattatttcccggaacctgttactgtgtcttggaatagcggcgctctcacctctggtgttcacacttttccggcagttttgcagtccagcggactttattccctttcatcagtcgtgaccgtcccaagttcctctctgggaacccagacatacatctgcaacgtgaaccacaaaccctctaacactaaggttgataagaaggtggaacctaagagctgcgacaaaacccacacatgtcctccctgtcctgcccctgaactgctgggcgggccttccgtgttcctgtttcctcctaagcctaaggatacactgatgattagcaggacacccgaggtcacctgcgtcgtggtcgacgtctcccacgaggaccctgaagtgaaatttaattggtatgtcgatggagtcgaggtccacaatgccaagaccaaacctagagaggaacaatataattccacatatagagtcgtgtccgtcctcacagtcctccaccaagattggctcaatggcaaagagtataaatgcaaagtgagcaataaggctctgcccgctcccattgaaaaaacaatctccaaagctaagggccaacccagagaaccccaggtgtatacactgccccccagcagagaagagatgaccaaaaaccaggtcagcctgacatgtctcgtgaaaggattctatcctagcgacattgccgtggagtgggagtccaatggccagcctgagaataactataagaccaccccccctgtgctggactccgatggatccttcttcctctacagcaagctgacagtggataaaagcagatggcaacagggaaacgtgttcagctgtagcgtcatgcatgaagccctgcacaatcattatacccaaaaaagcctctccctgtctccaggaggtggtggaggaagcggaggtggcggtagtcaggtgcaactggtcgagtccggcggaggcgtcgtgcaacctggcaggagcctcagactctcctgtgctgctagcggctttaccttctccaaatacgctatgaactgggccagacaagcgccgggcaagggcctcgagtgggtagcgtttatcgatacggccggcaggaccatctatgccgattcagtgaaaggcagatttaccatttcccgggataactcaaagaataccttgtaccttcaaatgaattctctgagagctgaagataccgccgtctattattgcgcccctagctacggcgattccggagattacttcgactattggggccaaggaaccctggttacagtcagcagctaatag

SEQ ID NO: 8529 - DNA, 1758 bp, synthetic construct
  source 1..1758: mol_type = other DNA
gaggtgcaactggtagagagcggcgggggcttagtccagcctgggggctccctccggctgtcttgttccgcaagcggattcactttttcatccttcggcatgcactgggtcagacaagctccgggcaaaggacttgaatgggtggcatatatcagctcagggagttccaccatttactacggggacaccgttaaaggcaggttcacgattagtagggataatgccaagaattccctcttcctgcaaatgtctagccttagagccgaggatactgccgtttactactgtgcgcgagaagggggctactactacggacgctcatactacactatggattattggggccaagggacgaccgtaactgtaagctctgcatcaacgaaaggccctagtgtgtttcctctcgcacccagcagtaaaagcacctcagggggtactgctgccctgggctgccttgtgaaagattatttcccggaacctgttactgtgtcttggaatagcggcgctctcacctctggtgttcacacttttccggcagttttgcagtccagcggactttattccctttcatcagtcgtgaccgtcccaagttcctctctgggaacccagacatacatctgcaacgtgaaccacaaaccctctaacactaaggttgataagaaggtggaacctaagagctgcgacaaaacccacacatgtcctccctgtcctgcccctgaactgctgggcgggccttccgtgttcctgtttcctcctaagcctaaggatacactgatgattagcaggacacccgaggtcacctgcgtcgtggtcgacgtctcccacgaggaccctgaagtgaaatttaattggtatgtcgatggagtcgaggtccacaatgccaagaccaaacctagagaggaacaatataattccacatatagagtcgtgtccgtcctcacagtcctccaccaagattggctcaatggcaaagagtataaatgcaaagtgagcaataaggctctgcccgctcccattgaaaaaacaatctccaaagctaagggccaacccagagaaccccaggtgtatacactgccccccagcagagaagagatgaccaaaaaccaggtcagcctgacatgtctcgtgaaaggattctatcctagcgacattgccgtggagtgggagtccaatggccagcctgagaataactataagaccaccccccctgtgctggactccgatggatccttcttcctctacagcaagctgacagtggataaaagcagatggcaacagggaaacgtgttcagctgtagcgtcatgcatgaagccctgcacaatcattatacccaaaaaagcctctccctgtctccaggaggtggtggaggaagcggaggtggcggtagtcaggtgcaactggtcgagtccggcggaggcgtcgtgcaacctggcaggagcctcagactctcctgtgctgctagcggcttccctttttctagctacggaatgggatggttccgtcaggctccaggcaaggagcgagagggtgttgcaggagtgaatacggggggaagaacatcctatgcagagtccgtaaaggggcgattcaccatctcccgggacaatacacgcaacacactttacttacagatgaatagccttcgtgccgaagataccgccgtgtattactgtgctagaatacgggcggccggcacagtggcgccctacttcgactactggggccaaggaaccctggttacagtcagcagctaatag

SEQ ID NO: 8530 - DNA, 1749 bp, synthetic construct
  source 1..1749: mol_type = other DNA
gaggtgcaactggtagagagcggcgggggcttagtccagcctgggggctccctccggctgtcttgttccgcaagcggattcactttttcatccttcggcatgcactgggtcagacaagctccgggcaaaggacttgaatgggtggcatatatcagctcagggagttccaccatttactacggggacaccgttaaaggcaggttcacgattagtagggataatgccaagaattccctcttcctgcaaatgtctagccttagagccgaggatactgccgtttactactgtgcgcgagaagggggctactactacggacgctcatactacactatggattattggggccaagggacgaccgtaactgtaagctctgcatcaacgaaaggccctagtgtgtttcctctcgcacccagcagtaaaagcacctcagggggtactgctgccctgggctgccttgtgaaagattatttcccggaacctgttactgtgtcttggaatagcggcgctctcacctctggtgttcacacttttccggcagttttgcagtccagcggactttattccctttcatcagtcgtgaccgtcccaagttcctctctgggaacccagacatacatctgcaacgtgaaccacaaaccctctaacactaaggttgataagaaggtggaacctaagagctgcgacaaaacccacacatgtcctccctgtcctgcccctgaactgctgggcgggccttccgtgttcctgtttcctcctaagcctaaggatacactgatgattagcaggacacccgaggtcacctgcgtcgtggtcgacgtctcccacgaggaccctgaagtgaaatttaattggtatgtcgatggagtcgaggtccacaatgccaagaccaaacctagagaggaacaatataattccacatatagagtcgtgtccgtcctcacagtcctccaccaagattggctcaatggcaaagagtataaatgcaaagtgagcaataaggctctgcccgctcccattgaaaaaacaatctccaaagctaagggccaacccagagaaccccaggtgtatacactgccccccagcagagaagagatgaccaaaaaccaggtcagcctgacatgtctcgtgaaaggattctatcctagcgacattgccgtggagtgggagtccaatggccagcctgagaataactataagaccaccccccctgtgctggactccgatggatccttcttcctctacagcaagctgacagtggataaaagcagatggcaacagggaaacgtgttcagctgtagcgtcatgcatgaagccctgcacaatcattatacccaaaaaagcctctccctgtctccaggaggtggtggaggaagcggaggtggcggtagtcaggtgcaactggtcgagtccggcggaggcgtcgtgcaacctggcaggagcctcagactctcctgtgctgctagcggctacgtcgctggttacgtgggatggtacaggcaggctccaggtaaggatagggagggcgtagctgctatcgccagtgatgggatgacagcctacgcccatagtgtaaaaggcaggttcaccatctccagagataatagcaaaaacactctgtaccttcagatgaattctctcagggctgaagatactgctgtgtattactgtgcgtccggttactgctcagggtcaggctgctacttcgacagttggggccaaggaaccctggttacagtcagcagctaatag

SEQ ID NO: 8531 - DNA, 1743 bp, synthetic construct
  source 1..1743: mol_type = other DNA
gaggtgcaactggtagagagcggcgggggcttagtccagcctgggggctccctccggctgtcttgttccgcaagcggattcactttttcatccttcggcatgcactgggtcagacaagctccgggcaaaggacttgaatgggtggcatatatcagctcagggagttccaccatttactacggggacaccgttaaaggcaggttcacgattagtagggataatgccaagaattccctcttcctgcaaatgtctagccttagagccgaggatactgccgtttactactgtgcgcgagaagggggctactactacggacgctcatactacactatggattattggggccaagggacgaccgtaactgtaagctctgcatcaacgaaaggccctagtgtgtttcctctcgcacccagcagtaaaagcacctcagggggtactgctgccctgggctgccttgtgaaagattatttcccggaacctgttactgtgtcttggaatagcggcgctctcacctctggtgttcacacttttccggcagttttgcagtccagcggactttattccctttcatcagtcgtgaccgtcccaagttcctctctgggaacccagacatacatctgcaacgtgaaccacaaaccctctaacactaaggttgataagaaggtggaacctaagagctgcgacaaaacccacacatgtcctccctgtcctgcccctgaactgctgggcgggccttccgtgttcctgtttcctcctaagcctaaggatacactgatgattagcaggacacccgaggtcacctgcgtcgtggtcgacgtctcccacgaggaccctgaagtgaaatttaattggtatgtcgatggagtcgaggtccacaatgccaagaccaaacctagagaggaacaatataattccacatatagagtcgtgtccgtcctcacagtcctccaccaagattggctcaatggcaaagagtataaatgcaaagtgagcaataaggctctgcccgctcccattgaaaaaacaatctccaaagctaagggccaacccagagaaccccaggtgtatacactgccccccagcagagaagagatgaccaaaaaccaggtcagcctgacatgtctcgtgaaaggattctatcctagcgacattgccgtggagtgggagtccaatggccagcctgagaataactataagaccaccccccctgtgctggactccgatggatccttcttcctctacagcaagctgacagtggataaaagcagatggcaacagggaaacgtgttcagctgtagcgtcatgcatgaagccctgcacaatcattatacccaaaaaagcctctccctgtctccaggaggtggtggaggaagcggaggtggcggtagtcaggtgcaactggtcgagtccggcggaggcgtcgtgcaacctggcaggagcctcagactctcctgtgctgctagcggcttccgatataatagctacgccatggcctgggcacgtcaggctccaggcaagggacttgagtgggttgcagccatcgccggggacggaagaacagattatgcagactccgtaaaggggcgattcaccatctcccgggacaatagtaaaaacacactttacttacagatgaatagccttcgtgccgaagataccgccgtgtattactgtgctagagaggatacggccgccttcgactactggggccaaggaaccctggttacagtcagcagctaatag

SEQ ID NO: 8532 - DNA, 1773 bp, synthetic construct
  source 1..1773: mol_type = other DNA
gaggtgcaactggtagagagcggcgggggcttagtccagcctgggggctccctccggctgtcttgttccgcaagcggattcactttttcatccttcggcatgcactgggtcagacaagctccgggcaaaggacttgaatgggtggcatatatcagctcagggagttccaccatttactacggggacaccgttaaaggcaggttcacgattagtagggataatgccaagaattccctcttcctgcaaatgtctagccttagagccgaggatactgccgtttactactgtgcgcgagaagggggctactactacggacgctcatactacactatggattattggggccaagggacgaccgtaactgtaagctctgcatcaacgaaaggccctagtgtgtttcctctcgcacccagcagtaaaagcacctcagggggtactgctgccctgggctgccttgtgaaagattatttcccggaacctgttactgtgtcttggaatagcggcgctctcacctctggtgttcacacttttccggcagttttgcagtccagcggactttattccctttcatcagtcgtgaccgtcccaagttcctctctgggaacccagacatacatctgcaacgtgaaccacaaaccctctaacactaaggttgataagaaggtggaacctaagagctgcgacaaaacccacacatgtcctccctgtcctgcccctgaactgctgggcgggccttccgtgttcctgtttcctcctaagcctaaggatacactgatgattagcaggacacccgaggtcacctgcgtcgtggtcgacgtctcccacgaggaccctgaagtgaaatttaattggtatgtcgatggagtcgaggtccacaatgccaagaccaaacctagagaggaacaatataattccacatatagagtcgtgtccgtcctcacagtcctccaccaagattggctcaatggcaaagagtataaatgcaaagtgagcaataaggctctgcccgctcccattgaaaaaacaatctccaaagctaagggccaacccagagaaccccaggtgtatacactgccccccagcagagaagagatgaccaaaaaccaggtcagcctgacatgtctcgtgaaaggattctatcctagcgacattgccgtggagtgggagtccaatggccagcctgagaataactataagaccaccccccctgtgctggactccgatggatccttcttcctctacagcaagctgacagtggataaaagcagatggcaacagggaaacgtgttcagctgtagcgtcatgcatgaagccctgcacaatcattatacccaaaaaagcctctccctgtctccaggaggtggtggaggaagcggaggtggcggtagtcaggtgcaactggtcgagtccggcggaggcgtcgtgcaacctggcaggagcctcagactctcctgtgctgctagcggctaccgatctaatgggtactacatgggatggttccgtcaggctagtggcaaggagcgagagggtgttgcagtgatcgatagcgggggaagtacatcctatgcagactccgtaaaggggcgattcaccatctccctcgacaatgccaaaaacacactttacttacagatgaatagccttcgtgccgaagataccgccgtgtattactgtgctagaggggtaaagcggtatggagacgggggcacagacctctactattacttcgactattggggccaaggaaccctggttacagtcagcagctaatag

SEQ ID NO: 8533 - DNA, 1749 bp, synthetic construct
  source 1..1749: mol_type = other DNA
gaggtgcaactggtagagagcggcgggggcttagtccagcctgggggctccctccggctgtcttgttccgcaagcggattcactttttcatccttcggcatgcactgggtcagacaagctccgggcaaaggacttgaatgggtggcatatatcagctcagggagttccaccatttactacggggacaccgttaaaggcaggttcacgattagtagggataatgccaagaattccctcttcctgcaaatgtctagccttagagccgaggatactgccgtttactactgtgcgcgagaagggggctactactacggacgctcatactacactatggattattggggccaagggacgaccgtaactgtaagctctgcatcaacgaaaggccctagtgtgtttcctctcgcacccagcagtaaaagcacctcagggggtactgctgccctgggctgccttgtgaaagattatttcccggaacctgttactgtgtcttggaatagcggcgctctcacctctggtgttcacacttttccggcagttttgcagtccagcggactttattccctttcatcagtcgtgaccgtcccaagttcctctctgggaacccagacatacatctgcaacgtgaaccacaaaccctctaacactaaggttgataagaaggtggaacctaagagctgcgacaaaacccacacatgtcctccctgtcctgcccctgaactgctgggcgggccttccgtgttcctgtttcctcctaagcctaaggatacactgatgattagcaggacacccgaggtcacctgcgtcgtggtcgacgtctcccacgaggaccctgaagtgaaatttaattggtatgtcgatggagtcgaggtccacaatgccaagaccaaacctagagaggaacaatataattccacatatagagtcgtgtccgtcctcacagtcctccaccaagattggctcaatggcaaagagtataaatgcaaagtgagcaataaggctctgcccgctcccattgaaaaaacaatctccaaagctaagggccaacccagagaaccccaggtgtatacactgccccccagcagagaagagatgaccaaaaaccaggtcagcctgacatgtctcgtgaaaggattctatcctagcgacattgccgtggagtgggagtccaatggccagcctgagaataactataagaccaccccccctgtgctggactccgatggatccttcttcctctacagcaagctgacagtggataaaagcagatggcaacagggaaacgtgttcagctgtagcgtcatgcatgaagccctgcacaatcattatacccaaaaaagcctctccctgtctccaggaggtggtggaggaagcggaggtggcggtagtcaggtgcaactggtcgagtccggcggaggcgtcgtgcaacctggcaggagcctcagactctcctgtgctgctagcggctacaccttacctatgagcaccgcatgggcgaggcaagcacctggaaaagggctagaatgggttgctgcaatcgcctccgacgggagaacagactatgctgactcagtcaaggggaggtttaccatttcgcgagataactccaagaatacagtgtatctgcaaatgaattcactgcgcgctgaagatactgccgtctactattgcgccactctgtggtggtacggcggcagaacgttcgacagttggggccaaggaaccctggttacagtcagcagctaatag

SEQ ID NO: 8534 - DNA, 1770 bp, synthetic construct
  source 1..1770: mol_type = other DNA
gaggtgcaactggtagagagcggcgggggcttagtccagcctgggggctccctccggctgtcttgttccgcaagcggattcactttttcatccttcggcatgcactgggtcagacaagctccgggcaaaggacttgaatgggtggcatatatcagctcagggagttccaccatttactacggggacaccgttaaaggcaggttcacgattagtagggataatgccaagaattccctcttcctgcaaatgtctagccttagagccgaggatactgccgtttactactgtgcgcgagaagggggctactactacggacgctcatactacactatggattattggggccaagggacgaccgtaactgtaagctctgcatcaacgaaaggccctagtgtgtttcctctcgcacccagcagtaaaagcacctcagggggtactgctgccctgggctgccttgtgaaagattatttcccggaacctgttactgtgtcttggaatagcggcgctctcacctctggtgttcacacttttccggcagttttgcagtccagcggactttattccctttcatcagtcgtgaccgtcccaagttcctctctgggaacccagacatacatctgcaacgtgaaccacaaaccctctaacactaaggttgataagaaggtggaacctaagagctgcgacaaaacccacacatgtcctccctgtcctgcccctgaactgctgggcgggccttccgtgttcctgtttcctcctaagcctaaggatacactgatgattagcaggacacccgaggtcacctgcgtcgtggtcgacgtctcccacgaggaccctgaagtgaaatttaattggtatgtcgatggagtcgaggtccacaatgccaagaccaaacctagagaggaacaatataattccacatatagagtcgtgtccgtcctcacagtcctccaccaagattggctcaatggcaaagagtataaatgcaaagtgagcaataaggctctgcccgctcccattgaaaaaacaatctccaaagctaagggccaacccagagaaccccaggtgtatacactgccccccagcagagaagagatgaccaaaaaccaggtcagcctgacatgtctcgtgaaaggattctatcctagcgacattgccgtggagtgggagtccaatggccagcctgagaataactataagaccaccccccctgtgctggactccgatggatccttcttcctctacagcaagctgacagtggataaaagcagatggcaacagggaaacgtgttcagctgtagcgtcatgcatgaagccctgcacaatcattatacccaaaaaagcctctccctgtctccaggaggtggtggaggaagcggaggtggcggtagtcaggtgcaactggtcgagtccggcggaggcgtcgtgcaacctggcaggagcctcagactctcctgtgctgctagcggcttcacctttgatgacttcgacatgggatggtaccgtcaggctccaggcaaggaccgagagggtgttgcagtgatccggagcgacggaatcctggcctatagtgactccgtaaaggggcgattcaccatctcccgggacaatagtaaaaacacagtctacttacagatgaatagccttcgtgccgaagataccgccgtgtattactgtgctagaagccggagcaactatagtagcgacgcctacgcctactactggttcgacgtgtggggccaaggaaccctggttacagtcagcagctaatag

SEQ ID NO: 8535 - DNA, 1752 bp, synthetic construct
  source 1..1752: mol_type = other DNA
gaggtgcaactggtagagagcggcgggggcttagtccagcctgggggctccctccggctgtcttgttccgcaagcggattcactttttcatccttcggcatgcactgggtcagacaagctccgggcaaaggacttgaatgggtggcatatatcagctcagggagttccaccatttactacggggacaccgttaaaggcaggttcacgattagtagggataatgccaagaattccctcttcctgcaaatgtctagccttagagccgaggatactgccgtttactactgtgcgcgagaagggggctactactacggacgctcatactacactatggattattggggccaagggacgaccgtaactgtaagctctgcatcaacgaaaggccctagtgtgtttcctctcgcacccagcagtaaaagcacctcagggggtactgctgccctgggctgccttgtgaaagattatttcccggaacctgttactgtgtcttggaatagcggcgctctcacctctggtgttcacacttttccggcagttttgcagtccagcggactttattccctttcatcagtcgtgaccgtcccaagttcctctctgggaacccagacatacatctgcaacgtgaaccacaaaccctctaacactaaggttgataagaaggtggaacctaagagctgcgacaaaacccacacatgtcctccctgtcctgcccctgaactgctgggcgggccttccgtgttcctgtttcctcctaagcctaaggatacactgatgattagcaggacacccgaggtcacctgcgtcgtggtcgacgtctcccacgaggaccctgaagtgaaatttaattggtatgtcgatggagtcgaggtccacaatgccaagaccaaacctagagaggaacaatataattccacatatagagtcgtgtccgtcctcacagtcctccaccaagattggctcaatggcaaagagtataaatgcaaagtgagcaataaggctctgcccgctcccattgaaaaaacaatctccaaagctaagggccaacccagagaaccccaggtgtatacactgccccccagcagagaagagatgaccaaaaaccaggtcagcctgacatgtctcgtgaaaggattctatcctagcgacattgccgtggagtgggagtccaatggccagcctgagaataactataagaccaccccccctgtgctggactccgatggatccttcttcctctacagcaagctgacagtggataaaagcagatggcaacagggaaacgtgttcagctgtagcgtcatgcatgaagccctgcacaatcattatacccaaaaaagcctctccctgtctccaggaggtggtggaggaagcggaggtggcggtagtcaggtgcaactggtcgagtccggcggaggcgtcgtgcaacctggcaggagcctcagactctcctgtgctgctagcggcggatttgatgatgcagacgccgagtgggggtgggctaggcaagcacctgggaagggcctcgaatgggtggccgccatcgcgggggacggaagaaccgattacgccggctcagtgaagggccggtttaccatttccagggataactctaagaacactgtgtatcttcaaatgaactccttacgggctgaagacaccgcagtctactattgtgccaagaatgggcagtcaggattcagcttcgacccctggggccaaggaaccctggttacagtcagcagctaatag

SEQ ID NO: 8536 - DNA, 1761 bp, synthetic construct
  source 1..1761: mol_type = other DNA
gaggtgcaactggtagagagcggcgggggcttagtccagcctgggggctccctccggctgtcttgttccgcaagcggattcactttttcatccttcggcatgcactgggtcagacaagctccgggcaaaggacttgaatgggtggcatatatcagctcagggagttccaccatttactacggggacaccgttaaaggcaggttcacgattagtagggataatgccaagaattccctcttcctgcaaatgtctagccttagagccgaggatactgccgtttactactgtgcgcgagaagggggctactactacggacgctcatactacactatggattattggggccaagggacgaccgtaactgtaagctctgcatcaacgaaaggccctagtgtgtttcctctcgcacccagcagtaaaagcacctcagggggtactgctgccctgggctgccttgtgaaagattatttcccggaacctgttactgtgtcttggaatagcggcgctctcacctctggtgttcacacttttccggcagttttgcagtccagcggactttattccctttcatcagtcgtgaccgtcccaagttcctctctgggaacccagacatacatctgcaacgtgaaccacaaaccctctaacactaaggttgataagaaggtggaacctaagagctgcgacaaaacccacacatgtcctccctgtcctgcccctgaactgctgggcgggccttccgtgttcctgtttcctcctaagcctaaggatacactgatgattagcaggacacccgaggtcacctgcgtcgtggtcgacgtctcccacgaggaccctgaagtgaaatttaattggtatgtcgatggagtcgaggtccacaatgccaagaccaaacctagagaggaacaatataattccacatatagagtcgtgtccgtcctcacagtcctccaccaagattggctcaatggcaaagagtataaatgcaaagtgagcaataaggctctgcccgctcccattgaaaaaacaatctccaaagctaagggccaacccagagaaccccaggtgtatacactgccccccagcagagaagagatgaccaaaaaccaggtcagcctgacatgtctcgtgaaaggattctatcctagcgacattgccgtggagtgggagtccaatggccagcctgagaataactataagaccaccccccctgtgctggactccgatggatccttcttcctctacagcaagctgacagtggataaaagcagatggcaacagggaaacgtgttcagctgtagcgtcatgcatgaagccctgcacaatcattatacccaaaaaagcctctccctgtctccaggaggtggtggaggaagcggaggtggcggtagtcaggtgcaactggtcgagtccggcggaggcgtcgtgcaacctggcaggagcctcagactctcctgtgctgctagcggctacaccttacctatgagcaccgcatgggcgaggcaagcacctggaaaagggctagaatgggttgctgcaatcgcctccgacgggagaacagactatgctgactcagtcaaggggaggtttaccatttcgcgagataactccaagaatacagtgtatctgcaaatgaattcactgcgcgctgaagatactgccgtctactattgcgcctctctgagccgggggacctatagtagcgggtggaagtgggacgactattggggccaaggaaccctggttacagtcagcagctaatag

SEQ ID NO: 8537 - DNA, 1758 bp, synthetic construct
  source 1..1758: mol_type = other DNA
gaggtgcaactggtagagagcggcgggggcttagtccagcctgggggctccctccggctgtcttgttccgcaagcggattcactttttcatccttcggcatgcactgggtcagacaagctccgggcaaaggacttgaatgggtggcatatatcagctcagggagttccaccatttactacggggacaccgttaaaggcaggttcacgattagtagggataatgccaagaattccctcttcctgcaaatgtctagccttagagccgaggatactgccgtttactactgtgcgcgagaagggggctactactacggacgctcatactacactatggattattggggccaagggacgaccgtaactgtaagctctgcatcaacgaaaggccctagtgtgtttcctctcgcacccagcagtaaaagcacctcagggggtactgctgccctgggctgccttgtgaaagattatttcccggaacctgttactgtgtcttggaatagcggcgctctcacctctggtgttcacacttttccggcagttttgcagtccagcggactttattccctttcatcagtcgtgaccgtcccaagttcctctctgggaacccagacatacatctgcaacgtgaaccacaaaccctctaacactaaggttgataagaaggtggaacctaagagctgcgacaaaacccacacatgtcctccctgtcctgcccctgaactgctgggcgggccttccgtgttcctgtttcctcctaagcctaaggatacactgatgattagcaggacacccgaggtcacctgcgtcgtggtcgacgtctcccacgaggaccctgaagtgaaatttaattggtatgtcgatggagtcgaggtccacaatgccaagaccaaacctagagaggaacaatataattccacatatagagtcgtgtccgtcctcacagtcctccaccaagattggctcaatggcaaagagtataaatgcaaagtgagcaataaggctctgcccgctcccattgaaaaaacaatctccaaagctaagggccaacccagagaaccccaggtgtatacactgccccccagcagagaagagatgaccaaaaaccaggtcagcctgacatgtctcgtgaaaggattctatcctagcgacattgccgtggagtgggagtccaatggccagcctgagaataactataagaccaccccccctgtgctggactccgatggatccttcttcctctacagcaagctgacagtggataaaagcagatggcaacagggaaacgtgttcagctgtagcgtcatgcatgaagccctgcacaatcattatacccaaaaaagcctctccctgtctccaggaggtggtggaggaagcggaggtggcggtagtcaggtgcaactggtcgagtccggcggaggcgtcgtgcaacctggcaggagcctcagactctcctgtgctgctagcggcttcaccttttctagctacgccatgtcatggttccgtcaggctctgggcaaggaccgagagggtgttgcagccatcgatagcgacggaacaacatcctatggagagtccgtaaaggggcgattcaccatctcccgggacaatagtaaaaacacagtctacttacagatgaatagccttcgtgccgaagataccgccgtgtattactgtgctagagcgtggggggtaggcgacgactactacagaatggactactggggccaaggaaccctggttacagtcagcagctaatag

SEQ ID NO: 8538 - DNA, 1752 bp, synthetic construct
  source 1..1752: mol_type = other DNA
gaggtgcaactggtagagagcggcgggggcttagtccagcctgggggctccctccggctgtcttgttccgcaagcggattcactttttcatccttcggcatgcactgggtcagacaagctccgggcaaaggacttgaatgggtggcatatatcagctcagggagttccaccatttactacggggacaccgttaaaggcaggttcacgattagtagggataatgccaagaattccctcttcctgcaaatgtctagccttagagccgaggatactgccgtttactactgtgcgcgagaagggggctactactacggacgctcatactacactatggattattggggccaagggacgaccgtaactgtaagctctgcatcaacgaaaggccctagtgtgtttcctctcgcacccagcagtaaaagcacctcagggggtactgctgccctgggctgccttgtgaaagattatttcccggaacctgttactgtgtcttggaatagcggcgctctcacctctggtgttcacacttttccggcagttttgcagtccagcggactttattccctttcatcagtcgtgaccgtcccaagttcctctctgggaacccagacatacatctgcaacgtgaaccacaaaccctctaacactaaggttgataagaaggtggaacctaagagctgcgacaaaacccacacatgtcctccctgtcctgcccctgaactgctgggcgggccttccgtgttcctgtttcctcctaagcctaaggatacactgatgattagcaggacacccgaggtcacctgcgtcgtggtcgacgtctcccacgaggaccctgaagtgaaatttaattggtatgtcgatggagtcgaggtccacaatgccaagaccaaacctagagaggaacaatataattccacatatagagtcgtgtccgtcctcacagtcctccaccaagattggctcaatggcaaagagtataaatgcaaagtgagcaataaggctctgcccgctcccattgaaaaaacaatctccaaagctaagggccaacccagagaaccccaggtgtatacactgccccccagcagagaagagatgaccaaaaaccaggtcagcctgacatgtctcgtgaaaggattctatcctagcgacattgccgtggagtgggagtccaatggccagcctgagaataactataagaccaccccccctgtgctggactccgatggatccttcttcctctacagcaagctgacagtggataaaagcagatggcaacagggaaacgtgttcagctgtagcgtcatgcatgaagccctgcacaatcattatacccaaaaaagcctctccctgtctccaggaggtggtggaggaagcggaggtggcggtagtcaggtgcaactggtcgagtccggcggaggcgtcgtgcaacctggcaggagcctcagactctcctgtgctgctagcggctacaccgctactaactacgccatgggatgggtgcgtagggctccaggcaagggagaagagtgggttgcaacaatcgatagcgacggaagagcatcctatgcagactccgtaaaggggcgattcaccatctccgccgacactagtaaaaacacagcttacttacagatgaatagccttcgtgccgaagataccgccgtgtattactgtggtagactgcagtactcatcaggatggtactcagactactggggccaaggaaccctggttacagtcagcagctaatag

SEQ ID NO: 8539 - DNA, 1749 bp, synthetic construct
  source 1..1749: mol_type = other DNA
gaggtgcaactggtagagagcggcgggggcttagtccagcctgggggctccctccggctgtcttgttccgcaagcggattcactttttcatccttcggcatgcactgggtcagacaagctccgggcaaaggacttgaatgggtggcatatatcagctcagggagttccaccatttactacggggacaccgttaaaggcaggttcacgattagtagggataatgccaagaattccctcttcctgcaaatgtctagccttagagccgaggatactgccgtttactactgtgcgcgagaagggggctactactacggacgctcatactacactatggattattggggccaagggacgaccgtaactgtaagctctgcatcaacgaaaggccctagtgtgtttcctctcgcacccagcagtaaaagcacctcagggggtactgctgccctgggctgccttgtgaaagattatttcccggaacctgttactgtgtcttggaatagcggcgctctcacctctggtgttcacacttttccggcagttttgcagtccagcggactttattccctttcatcagtcgtgaccgtcccaagttcctctctgggaacccagacatacatctgcaacgtgaaccacaaaccctctaacactaaggttgataagaaggtggaacctaagagctgcgacaaaacccacacatgtcctccctgtcctgcccctgaactgctgggcgggccttccgtgttcctgtttcctcctaagcctaaggatacactgatgattagcaggacacccgaggtcacctgcgtcgtggtcgacgtctcccacgaggaccctgaagtgaaatttaattggtatgtcgatggagtcgaggtccacaatgccaagaccaaacctagagaggaacaatataattccacatatagagtcgtgtccgtcctcacagtcctccaccaagattggctcaatggcaaagagtataaatgcaaagtgagcaataaggctctgcccgctcccattgaaaaaacaatctccaaagctaagggccaacccagagaaccccaggtgtatacactgccccccagcagagaagagatgaccaaaaaccaggtcagcctgacatgtctcgtgaaaggattctatcctagcgacattgccgtggagtgggagtccaatggccagcctgagaataactataagaccaccccccctgtgctggactccgatggatccttcttcctctacagcaagctgacagtggataaaagcagatggcaacagggaaacgtgttcagctgtagcgtcatgcatgaagccctgcacaatcattatacccaaaaaagcctctccctgtctccaggaggtggtggaggaagcggaggtggcggtagtcaggtgcaactggtcgagtccggcggaggcgtcgtgcaacctggcaggagcctcagactctcctgtgctgctagcggcttctcctttgatgacctggacatgggatgggcacgtcaggctccaggcaagggacttgagtgggttgcaacaatcaccaacggggactacacacggtatagtgactccgtaaaggggcgattcaccatctcccgggacaatagtaaaaacacactttacttacagatgaatagccttcgtgccgaagataccgccgtgtattactgtgctagagacctcagcggctcactgtacttcgactactggggccaaggaaccctggttacagtcagcagctaatag

SEQ ID NO: 8540 - DNA, 1758 bp, synthetic construct
  source 1..1758: mol_type = other DNA
gaggtgcaactggtagagagcggcgggggcttagtccagcctgggggctccctccggctgtcttgttccgcaagcggattcactttttcatccttcggcatgcactgggtcagacaagctccgggcaaaggacttgaatgggtggcatatatcagctcagggagttccaccatttactacggggacaccgttaaaggcaggttcacgattagtagggataatgccaagaattccctcttcctgcaaatgtctagccttagagccgaggatactgccgtttactactgtgcgcgagaagggggctactactacggacgctcatactacactatggattattggggccaagggacgaccgtaactgtaagctctgcatcaacgaaaggccctagtgtgtttcctctcgcacccagcagtaaaagcacctcagggggtactgctgccctgggctgccttgtgaaagattatttcccggaacctgttactgtgtcttggaatagcggcgctctcacctctggtgttcacacttttccggcagttttgcagtccagcggactttattccctttcatcagtcgtgaccgtcccaagttcctctctgggaacccagacatacatctgcaacgtgaaccacaaaccctctaacactaaggttgataagaaggtggaacctaagagctgcgacaaaacccacacatgtcctccctgtcctgcccctgaactgctgggcgggccttccgtgttcctgtttcctcctaagcctaaggatacactgatgattagcaggacacccgaggtcacctgcgtcgtggtcgacgtctcccacgaggaccctgaagtgaaatttaattggtatgtcgatggagtcgaggtccacaatgccaagaccaaacctagagaggaacaatataattccacatatagagtcgtgtccgtcctcacagtcctccaccaagattggctcaatggcaaagagtataaatgcaaagtgagcaataaggctctgcccgctcccattgaaaaaacaatctccaaagctaagggccaacccagagaaccccaggtgtatacactgccccccagcagagaagagatgaccaaaaaccaggtcagcctgacatgtctcgtgaaaggattctatcctagcgacattgccgtggagtgggagtccaatggccagcctgagaataactataagaccaccccccctgtgctggactccgatggatccttcttcctctacagcaagctgacagtggataaaagcagatggcaacagggaaacgtgttcagctgtagcgtcatgcatgaagccctgcacaatcattatacccaaaaaagcctctccctgtctccaggaggtggtggaggaagcggaggtggcggtagtcaggtgcaactggtcgagtccggcggaggcgtcgtgcaacctggcaggagcctcagactctcctgtgctgctagcggctacaccgtttctaacaactgcatgggatggttccgtcaggctccaggcaaggagcgagagttagttgcagtgatcggcagcgacggacacgcaacctatgcagcctccgtagaggggcgattcaccatctcccgggacaatgccaaaaggatggtctacttacagatgaatagccttcgtgccgaagataccgccgtgtattactgtgctagagcgcacccgcggggcagtgggagctactacttcgactactggggccaaggaaccctggttacagtcagcagctaatag

SEQ ID NO: 8541 - DNA, 1755 bp, synthetic construct
  source 1..1755: mol_type = other DNA
gaggtgcaactggtagagagcggcgggggcttagtccagcctgggggctccctccggctgtcttgttccgcaagcggattcactttttcatccttcggcatgcactgggtcagacaagctccgggcaaaggacttgaatgggtggcatatatcagctcagggagttccaccatttactacggggacaccgttaaaggcaggttcacgattagtagggataatgccaagaattccctcttcctgcaaatgtctagccttagagccgaggatactgccgtttactactgtgcgcgagaagggggctactactacggacgctcatactacactatggattattggggccaagggacgaccgtaactgtaagctctgcatcaacgaaaggccctagtgtgtttcctctcgcacccagcagtaaaagcacctcagggggtactgctgccctgggctgccttgtgaaagattatttcccggaacctgttactgtgtcttggaatagcggcgctctcacctctggtgttcacacttttccggcagttttgcagtccagcggactttattccctttcatcagtcgtgaccgtcccaagttcctctctgggaacccagacatacatctgcaacgtgaaccacaaaccctctaacactaaggttgataagaaggtggaacctaagagctgcgacaaaacccacacatgtcctccctgtcctgcccctgaactgctgggcgggccttccgtgttcctgtttcctcctaagcctaaggatacactgatgattagcaggacacccgaggtcacctgcgtcgtggtcgacgtctcccacgaggaccctgaagtgaaatttaattggtatgtcgatggagtcgaggtccacaatgccaagaccaaacctagagaggaacaatataattccacatatagagtcgtgtccgtcctcacagtcctccaccaagattggctcaatggcaaagagtataaatgcaaagtgagcaataaggctctgcccgctcccattgaaaaaacaatctccaaagctaagggccaacccagagaaccccaggtgtatacactgccccccagcagagaagagatgaccaaaaaccaggtcagcctgacatgtctcgtgaaaggattctatcctagcgacattgccgtggagtgggagtccaatggccagcctgagaataactataagaccaccccccctgtgctggactccgatggatccttcttcctctacagcaagctgacagtggataaaagcagatggcaacagggaaacgtgttcagctgtagcgtcatgcatgaagccctgcacaatcattatacccaaaaaagcctctccctgtctccaggaggtggtggaggaagcggaggtggcggtagtcaggtgcaactggtcgagtccggcggaggcgtcgtgcaacctggcaggagcctcagactctcctgtgctgctagcggcttccgatataatagctacgccatggcctgggcacgtcaggctccaggcaagggagaagagtgggttgcagccatcgatggggacggaacaacagattatgcagactccgtaaaggggcgattcaccatctccgccgacactagtaaaaacacagtctacttacagatgaatagccttcgtgccgaagataccgccgtgtattactgtgctacagtgaagaagttctggaacgggtacgccttcgactcatggggccaaggaaccctggttacagtcagcagctaatag

SEQ ID NO: 8542 - DNA, 1758 bp, synthetic construct
  source 1..1758: mol_type = other DNA
gaggtgcaactggtagagagcggcgggggcttagtccagcctgggggctccctccggctgtcttgttccgcaagcggattcactttttcatccttcggcatgcactgggtcagacaagctccgggcaaaggacttgaatgggtggcatatatcagctcagggagttccaccatttactacggggacaccgttaaaggcaggttcacgattagtagggataatgccaagaattccctcttcctgcaaatgtctagccttagagccgaggatactgccgtttactactgtgcgcgagaagggggctactactacggacgctcatactacactatggattattggggccaagggacgaccgtaactgtaagctctgcatcaacgaaaggccctagtgtgtttcctctcgcacccagcagtaaaagcacctcagggggtactgctgccctgggctgccttgtgaaagattatttcccggaacctgttactgtgtcttggaatagcggcgctctcacctctggtgttcacacttttccggcagttttgcagtccagcggactttattccctttcatcagtcgtgaccgtcccaagttcctctctgggaacccagacatacatctgcaacgtgaaccacaaaccctctaacactaaggttgataagaaggtggaacctaagagctgcgacaaaacccacacatgtcctccctgtcctgcccctgaactgctgggcgggccttccgtgttcctgtttcctcctaagcctaaggatacactgatgattagcaggacacccgaggtcacctgcgtcgtggtcgacgtctcccacgaggaccctgaagtgaaatttaattggtatgtcgatggagtcgaggtccacaatgccaagaccaaacctagagaggaacaatataattccacatatagagtcgtgtccgtcctcacagtcctccaccaagattggctcaatggcaaagagtataaatgcaaagtgagcaataaggctctgcccgctcccattgaaaaaacaatctccaaagctaagggccaacccagagaaccccaggtgtatacactgccccccagcagagaagagatgaccaaaaaccaggtcagcctgacatgtctcgtgaaaggattctatcctagcgacattgccgtggagtgggagtccaatggccagcctgagaataactataagaccaccccccctgtgctggactccgatggatccttcttcctctacagcaagctgacagtggataaaagcagatggcaacagggaaacgtgttcagctgtagcgtcatgcatgaagccctgcacaatcattatacccaaaaaagcctctccctgtctccaggaggtggtggaggaagcggaggtggcggtagtcaggtgcaactggtcgagtccggcggaggcgtcgtgcaacctggcaggagcctcagactctcctgtgctgctagcggcttcccttttggtgggtactcggtgggatggttccgtcaggctccaggcaaggagcgagagggtgttgcagtgatcgatagggacggaagtacaacctatgcagactccgtaaaggggcgattcaccatctcccgggacaatgccaaagacacactttacttacagatgaatagccttcgtgccgaagataccgccgtgtattactgtgctagagggggcaggaagggcctggggtggtactacttcgactactggggccaaggaaccctggttacagtcagcagctaatag

SEQ ID NO: 8543 - DNA, 1746 bp, synthetic construct
  source 1..1746: mol_type = other DNA
gaggtgcaactggtagagagcggcgggggcttagtccagcctgggggctccctccggctgtcttgttccgcaagcggattcactttttcatccttcggcatgcactgggtcagacaagctccgggcaaaggacttgaatgggtggcatatatcagctcagggagttccaccatttactacggggacaccgttaaaggcaggttcacgattagtagggataatgccaagaattccctcttcctgcaaatgtctagccttagagccgaggatactgccgtttactactgtgcgcgagaagggggctactactacggacgctcatactacactatggattattggggccaagggacgaccgtaactgtaagctctgcatcaacgaaaggccctagtgtgtttcctctcgcacccagcagtaaaagcacctcagggggtactgctgccctgggctgccttgtgaaagattatttcccggaacctgttactgtgtcttggaatagcggcgctctcacctctggtgttcacacttttccggcagttttgcagtccagcggactttattccctttcatcagtcgtgaccgtcccaagttcctctctgggaacccagacatacatctgcaacgtgaaccacaaaccctctaacactaaggttgataagaaggtggaacctaagagctgcgacaaaacccacacatgtcctccctgtcctgcccctgaactgctgggcgggccttccgtgttcctgtttcctcctaagcctaaggatacactgatgattagcaggacacccgaggtcacctgcgtcgtggtcgacgtctcccacgaggaccctgaagtgaaatttaattggtatgtcgatggagtcgaggtccacaatgccaagaccaaacctagagaggaacaatataattccacatatagagtcgtgtccgtcctcacagtcctccaccaagattggctcaatggcaaagagtataaatgcaaagtgagcaataaggctctgcccgctcccattgaaaaaacaatctccaaagctaagggccaacccagagaaccccaggtgtatacactgccccccagcagagaagagatgaccaaaaaccaggtcagcctgacatgtctcgtgaaaggattctatcctagcgacattgccgtggagtgggagtccaatggccagcctgagaataactataagaccaccccccctgtgctggactccgatggatccttcttcctctacagcaagctgacagtggataaaagcagatggcaacagggaaacgtgttcagctgtagcgtcatgcatgaagccctgcacaatcattatacccaaaaaagcctctccctgtctccaggaggtggtggaggaagcggaggtggcggtagtcaggtgcaactggtcgagtccggcggaggcgtcgtgcaacctggcaggagcctcagactctcctgtgctgctagcggcttctccttttctagctaccccatgacctgggtgcgtcaggctccaggcaagggacccgagtgggttagtatgatcaatagggacggaagtacatattatggagactccgtaaaggggcgattcgccatctcccgggacaatgccaaaaacacactttacttacagatgaatagccttcgtgccgaagataccgccgtgtattactgtgctagagacggcgggtcatatgacatggacgtatggggccaaggaaccctggttacagtcagcagctaatag

SEQ ID NO: 8544 - DNA, 1743 bp, synthetic construct
  source 1..1743: mol_type = other DNA
gaggtgcaactggtagagagcggcgggggcttagtccagcctgggggctccctccggctgtcttgttccgcaagcggattcactttttcatccttcggcatgcactgggtcagacaagctccgggcaaaggacttgaatgggtggcatatatcagctcagggagttccaccatttactacggggacaccgttaaaggcaggttcacgattagtagggataatgccaagaattccctcttcctgcaaatgtctagccttagagccgaggatactgccgtttactactgtgcgcgagaagggggctactactacggacgctcatactacactatggattattggggccaagggacgaccgtaactgtaagctctgcatcaacgaaaggccctagtgtgtttcctctcgcacccagcagtaaaagcacctcagggggtactgctgccctgggctgccttgtgaaagattatttcccggaacctgttactgtgtcttggaatagcggcgctctcacctctggtgttcacacttttccggcagttttgcagtccagcggactttattccctttcatcagtcgtgaccgtcccaagttcctctctgggaacccagacatacatctgcaacgtgaaccacaaaccctctaacactaaggttgataagaaggtggaacctaagagctgcgacaaaacccacacatgtcctccctgtcctgcccctgaactgctgggcgggccttccgtgttcctgtttcctcctaagcctaaggatacactgatgattagcaggacacccgaggtcacctgcgtcgtggtcgacgtctcccacgaggaccctgaagtgaaatttaattggtatgtcgatggagtcgaggtccacaatgccaagaccaaacctagagaggaacaatataattccacatatagagtcgtgtccgtcctcacagtcctccaccaagattggctcaatggcaaagagtataaatgcaaagtgagcaataaggctctgcccgctcccattgaaaaaacaatctccaaagctaagggccaacccagagaaccccaggtgtatacactgccccccagcagagaagagatgaccaaaaaccaggtcagcctgacatgtctcgtgaaaggattctatcctagcgacattgccgtggagtgggagtccaatggccagcctgagaataactataagaccaccccccctgtgctggactccgatggatccttcttcctctacagcaagctgacagtggataaaagcagatggcaacagggaaacgtgttcagctgtagcgtcatgcatgaagccctgcacaatcattatacccaaaaaagcctctccctgtctccaggaggtggtggaggaagcggaggtggcggtagtcaggtgcaactggtcgagtccggcggaggcgtcgtgcaacctggcaggagcctcagactctcctgtgctgctagcggctacaccttacctatgagcaccgcatgggcgaggcaagcacctggaaaagggctagaatgggttgctgcaatcgcctccgacgggagaacagactatgctgactcagtcaaggggaggtttaccatttcgcgagataactccaagaatacagtgtatctgcaaatgaattcactgcgcgctgaagatactgccgtctactattgcgccactctgagcatggcgcggaatagtgactactggggccaaggaaccctggttacagtcagcagctaatag

SEQ ID NO: 8545 - DNA, 1749 bp, synthetic construct
  source 1..1749: mol_type = other DNA
gaggtgcaactggtagagagcggcgggggcttagtccagcctgggggctccctccggctgtcttgttccgcaagcggattcactttttcatccttcggcatgcactgggtcagacaagctccgggcaaaggacttgaatgggtggcatatatcagctcagggagttccaccatttactacggggacaccgttaaaggcaggttcacgattagtagggataatgccaagaattccctcttcctgcaaatgtctagccttagagccgaggatactgccgtttactactgtgcgcgagaagggggctactactacggacgctcatactacactatggattattggggccaagggacgaccgtaactgtaagctctgcatcaacgaaaggccctagtgtgtttcctctcgcacccagcagtaaaagcacctcagggggtactgctgccctgggctgccttgtgaaagattatttcccggaacctgttactgtgtcttggaatagcggcgctctcacctctggtgttcacacttttccggcagttttgcagtccagcggactttattccctttcatcagtcgtgaccgtcccaagttcctctctgggaacccagacatacatctgcaacgtgaaccacaaaccctctaacactaaggttgataagaaggtggaacctaagagctgcgacaaaacccacacatgtcctccctgtcctgcccctgaactgctgggcgggccttccgtgttcctgtttcctcctaagcctaaggatacactgatgattagcaggacacccgaggtcacctgcgtcgtggtcgacgtctcccacgaggaccctgaagtgaaatttaattggtatgtcgatggagtcgaggtccacaatgccaagaccaaacctagagaggaacaatataattccacatatagagtcgtgtccgtcctcacagtcctccaccaagattggctcaatggcaaagagtataaatgcaaagtgagcaataaggctctgcccgctcccattgaaaaaacaatctccaaagctaagggccaacccagagaaccccaggtgtatacactgccccccagcagagaagagatgaccaaaaaccaggtcagcctgacatgtctcgtgaaaggattctatcctagcgacattgccgtggagtgggagtccaatggccagcctgagaataactataagaccaccccccctgtgctggactccgatggatccttcttcctctacagcaagctgacagtggataaaagcagatggcaacagggaaacgtgttcagctgtagcgtcatgcatgaagccctgcacaatcattatacccaaaaaagcctctccctgtctccaggaggtggtggaggaagcggaggtggcggtagtcaggtgcaactggtcgagtccggcggaggcgtcgtgcaacctggcaggagcctcagactctcctgtgctgctagcggcttcaccatttctgggtacaccatgcactggttccgtcaggctccaggcaagggacttgagtgggttgcaagtatcgatacggggggagacacaacctatctgccctccgtaaaggggcgattcaccatctcccgggacaatagtaaaaacacactttacttacagatgaatagccttcgtgccgaagataccgccgtgtattactgtgctacagaccggaacggcggcggagcgttcgacgtgtggggccaaggaaccctggttacagtcagcagctaatag

SEQ ID NO: 8546 - DNA, 1743 bp, synthetic construct
  source 1..1743: mol_type = other DNA
gaggtgcaactggtagagagcggcgggggcttagtccagcctgggggctccctccggctgtcttgttccgcaagcggattcactttttcatccttcggcatgcactgggtcagacaagctccgggcaaaggacttgaatgggtggcatatatcagctcagggagttccaccatttactacggggacaccgttaaaggcaggttcacgattagtagggataatgccaagaattccctcttcctgcaaatgtctagccttagagccgaggatactgccgtttactactgtgcgcgagaagggggctactactacggacgctcatactacactatggattattggggccaagggacgaccgtaactgtaagctctgcatcaacgaaaggccctagtgtgtttcctctcgcacccagcagtaaaagcacctcagggggtactgctgccctgggctgccttgtgaaagattatttcccggaacctgttactgtgtcttggaatagcggcgctctcacctctggtgttcacacttttccggcagttttgcagtccagcggactttattccctttcatcagtcgtgaccgtcccaagttcctctctgggaacccagacatacatctgcaacgtgaaccacaaaccctctaacactaaggttgataagaaggtggaacctaagagctgcgacaaaacccacacatgtcctccctgtcctgcccctgaactgctgggcgggccttccgtgttcctgtttcctcctaagcctaaggatacactgatgattagcaggacacccgaggtcacctgcgtcgtggtcgacgtctcccacgaggaccctgaagtgaaatttaattggtatgtcgatggagtcgaggtccacaatgccaagaccaaacctagagaggaacaatataattccacatatagagtcgtgtccgtcctcacagtcctccaccaagattggctcaatggcaaagagtataaatgcaaagtgagcaataaggctctgcccgctcccattgaaaaaacaatctccaaagctaagggccaacccagagaaccccaggtgtatacactgccccccagcagagaagagatgaccaaaaaccaggtcagcctgacatgtctcgtgaaaggattctatcctagcgacattgccgtggagtgggagtccaatggccagcctgagaataactataagaccaccccccctgtgctggactccgatggatccttcttcctctacagcaagctgacagtggataaaagcagatggcaacagggaaacgtgttcagctgtagcgtcatgcatgaagccctgcacaatcattatacccaaaaaagcctctccctgtctccaggaggtggtggaggaagcggaggtggcggtagtcaggtgcaactggtcgagtccggcggaggcgtcgtgcaacctggcaggagcctcagactctcctgtgctgctagcggcttcatttctacttactacatgagttgggtgaggcaagcacctggaaaagggcccgaatgggtttctacaacaggagccgacgggacaacatactatgctgactcagtcaacgggaggtttaccgtctcgcaggataacgctaagaatacagtgtatctgcaaatgaattcactgcgcgctgaagatactgccgtctactattgcgcccgctacgaggatgggcccggcttcgacatatggggccaaggaaccctggttacagtcagcagctaatag

SEQ ID NO: 8547 - DNA, 1755 bp, synthetic construct
  source 1..1755: mol_type = other DNA
gaggtgcaactggtagagagcggcgggggcttagtccagcctgggggctccctccggctgtcttgttccgcaagcggattcactttttcatccttcggcatgcactgggtcagacaagctccgggcaaaggacttgaatgggtggcatatatcagctcagggagttccaccatttactacggggacaccgttaaaggcaggttcacgattagtagggataatgccaagaattccctcttcctgcaaatgtctagccttagagccgaggatactgccgtttactactgtgcgcgagaagggggctactactacggacgctcatactacactatggattattggggccaagggacgaccgtaactgtaagctctgcatcaacgaaaggccctagtgtgtttcctctcgcacccagcagtaaaagcacctcagggggtactgctgccctgggctgccttgtgaaagattatttcccggaacctgttactgtgtcttggaatagcggcgctctcacctctggtgttcacacttttccggcagttttgcagtccagcggactttattccctttcatcagtcgtgaccgtcccaagttcctctctgggaacccagacatacatctgcaacgtgaaccacaaaccctctaacactaaggttgataagaaggtggaacctaagagctgcgacaaaacccacacatgtcctccctgtcctgcccctgaactgctgggcgggccttccgtgttcctgtttcctcctaagcctaaggatacactgatgattagcaggacacccgaggtcacctgcgtcgtggtcgacgtctcccacgaggaccctgaagtgaaatttaattggtatgtcgatggagtcgaggtccacaatgccaagaccaaacctagagaggaacaatataattccacatatagagtcgtgtccgtcctcacagtcctccaccaagattggctcaatggcaaagagtataaatgcaaagtgagcaataaggctctgcccgctcccattgaaaaaacaatctccaaagctaagggccaacccagagaaccccaggtgtatacactgccccccagcagagaagagatgaccaaaaaccaggtcagcctgacatgtctcgtgaaaggattctatcctagcgacattgccgtggagtgggagtccaatggccagcctgagaataactataagaccaccccccctgtgctggactccgatggatccttcttcctctacagcaagctgacagtggataaaagcagatggcaacagggaaacgtgttcagctgtagcgtcatgcatgaagccctgcacaatcattatacccaaaaaagcctctccctgtctccaggaggtggtggaggaagcggaggtggcggtagtcaggtgcaactggtcgagtccggcggaggcgtcgtgcaacctggcaggagcctcagactctcctgtgctgctagcggctacaccttacctatgagcatgggatggtacaggcaagcacctggaaaagaccgggaaggcgttgctgcaatcgccggcgacgggagaacagactatgctgactcagtcaaggggaggtttaccatttcgcgagataactccaagaatacactgtatctgcaaatgaattcactgcgcgctgaagatactgccgtctactattgcgcccgcggagcggattggaactatggatactggtacttcgacctctggggccaaggaaccctggttacagtcagcagctaatag

SEQ ID NO: 8548 - DNA, 1770 bp, synthetic construct
  source 1..1770: mol_type = other DNA
gaggtgcaactggtagagagcggcgggggcttagtccagcctgggggctccctccggctgtcttgttccgcaagcggattcactttttcatccttcggcatgcactgggtcagacaagctccgggcaaaggacttgaatgggtggcatatatcagctcagggagttccaccatttactacggggacaccgttaaaggcaggttcacgattagtagggataatgccaagaattccctcttcctgcaaatgtctagccttagagccgaggatactgccgtttactactgtgcgcgagaagggggctactactacggacgctcatactacactatggattattggggccaagggacgaccgtaactgtaagctctgcatcaacgaaaggccctagtgtgtttcctctcgcacccagcagtaaaagcacctcagggggtactgctgccctgggctgccttgtgaaagattatttcccggaacctgttactgtgtcttggaatagcggcgctctcacctctggtgttcacacttttccggcagttttgcagtccagcggactttattccctttcatcagtcgtgaccgtcccaagttcctctctgggaacccagacatacatctgcaacgtgaaccacaaaccctctaacactaaggttgataagaaggtggaacctaagagctgcgacaaaacccacacatgtcctccctgtcctgcccctgaactgctgggcgggccttccgtgttcctgtttcctcctaagcctaaggatacactgatgattagcaggacacccgaggtcacctgcgtcgtggtcgacgtctcccacgaggaccctgaagtgaaatttaattggtatgtcgatggagtcgaggtccacaatgccaagaccaaacctagagaggaacaatataattccacatatagagtcgtgtccgtcctcacagtcctccaccaagattggctcaatggcaaagagtataaatgcaaagtgagcaataaggctctgcccgctcccattgaaaaaacaatctccaaagctaagggccaacccagagaaccccaggtgtatacactgccccccagcagagaagagatgaccaaaaaccaggtcagcctgacatgtctcgtgaaaggattctatcctagcgacattgccgtggagtgggagtccaatggccagcctgagaataactataagaccaccccccctgtgctggactccgatggatccttcttcctctacagcaagctgacagtggataaaagcagatggcaacagggaaacgtgttcagctgtagcgtcatgcatgaagccctgcacaatcattatacccaaaaaagcctctccctgtctccaggaggtggtggaggaagcggaggtggcggtagtcaggtgcaactggtcgagtccggcggaggcgtcgtgcaacctggcaggagcctcagactctcctgtgctgctagcggcttcccttttggtgggtactcggtgggatggttccgtcaggctccaggcaaggagcgagagggtgttgcagtgatcgatagggacggaagtacaacctatgcagactccgtaaaggggcgattcaccatctcccgggacaatgccaatgacacactttacttacagatgaatagccttcgtgccgaagataccgccgtgtattactgtgctaagagcgccaagtactattacgaggggtcatactactacgtgcatttcgactactggggccaaggaaccctggttacagtcagcagctaatag

SEQ ID NO: 8549 - DNA, 1764 bp, synthetic construct
  source 1..1764: mol_type = other DNA
gaggtgcaactggtagagagcggcgggggcttagtccagcctgggggctccctccggctgtcttgttccgcaagcggattcactttttcatccttcggcatgcactgggtcagacaagctccgggcaaaggacttgaatgggtggcatatatcagctcagggagttccaccatttactacggggacaccgttaaaggcaggttcacgattagtagggataatgccaagaattccctcttcctgcaaatgtctagccttagagccgaggatactgccgtttactactgtgcgcgagaagggggctactactacggacgctcatactacactatggattattggggccaagggacgaccgtaactgtaagctctgcatcaacgaaaggccctagtgtgtttcctctcgcacccagcagtaaaagcacctcagggggtactgctgccctgggctgccttgtgaaagattatttcccggaacctgttactgtgtcttggaatagcggcgctctcacctctggtgttcacacttttccggcagttttgcagtccagcggactttattccctttcatcagtcgtgaccgtcccaagttcctctctgggaacccagacatacatctgcaacgtgaaccacaaaccctctaacactaaggttgataagaaggtggaacctaagagctgcgacaaaacccacacatgtcctccctgtcctgcccctgaactgctgggcgggccttccgtgttcctgtttcctcctaagcctaaggatacactgatgattagcaggacacccgaggtcacctgcgtcgtggtcgacgtctcccacgaggaccctgaagtgaaatttaattggtatgtcgatggagtcgaggtccacaatgccaagaccaaacctagagaggaacaatataattccacatatagagtcgtgtccgtcctcacagtcctccaccaagattggctcaatggcaaagagtataaatgcaaagtgagcaataaggctctgcccgctcccattgaaaaaacaatctccaaagctaagggccaacccagagaaccccaggtgtatacactgccccccagcagagaagagatgaccaaaaaccaggtcagcctgacatgtctcgtgaaaggattctatcctagcgacattgccgtggagtgggagtccaatggccagcctgagaataactataagaccaccccccctgtgctggactccgatggatccttcttcctctacagcaagctgacagtggataaaagcagatggcaacagggaaacgtgttcagctgtagcgtcatgcatgaagccctgcacaatcattatacccaaaaaagcctctccctgtctccaggaggtggtggaggaagcggaggtggcggtagtcaggtgcaactggtcgagtccggcggaggcgtcgtgcaacctggcaggagcctcagactctcctgtgctgctagcggcttcaccactactacatacaccatgggatggttccgtcaggctccaggcaagggacgagagttagttgcagtgatcgatagcgacggagacacagcctatgcagagtccgtagaggggcgattcaccatctcccgggacaatgccaaaaggatggtctacttacagatgaatagccttcgtgccgaagataccgccgtgtattactgtgctagagacaaggggggctatggagactaccccttcttcctcttcgattactggggccaaggaaccctggttacagtcagcagctaatag

SEQ ID NO: 8550 - DNA, 1749 bp, synthetic construct
  source 1..1749: mol_type = other DNA
gaggtgcaactggtagagagcggcgggggcttagtccagcctgggggctccctccggctgtcttgttccgcaagcggattcactttttcatccttcggcatgcactgggtcagacaagctccgggcaaaggacttgaatgggtggcatatatcagctcagggagttccaccatttactacggggacaccgttaaaggcaggttcacgattagtagggataatgccaagaattccctcttcctgcaaatgtctagccttagagccgaggatactgccgtttactactgtgcgcgagaagggggctactactacggacgctcatactacactatggattattggggccaagggacgaccgtaactgtaagctctgcatcaacgaaaggccctagtgtgtttcctctcgcacccagcagtaaaagcacctcagggggtactgctgccctgggctgccttgtgaaagattatttcccggaacctgttactgtgtcttggaatagcggcgctctcacctctggtgttcacacttttccggcagttttgcagtccagcggactttattccctttcatcagtcgtgaccgtcccaagttcctctctgggaacccagacatacatctgcaacgtgaaccacaaaccctctaacactaaggttgataagaaggtggaacctaagagctgcgacaaaacccacacatgtcctccctgtcctgcccctgaactgctgggcgggccttccgtgttcctgtttcctcctaagcctaaggatacactgatgattagcaggacacccgaggtcacctgcgtcgtggtcgacgtctcccacgaggaccctgaagtgaaatttaattggtatgtcgatggagtcgaggtccacaatgccaagaccaaacctagagaggaacaatataattccacatatagagtcgtgtccgtcctcacagtcctccaccaagattggctcaatggcaaagagtataaatgcaaagtgagcaataaggctctgcccgctcccattgaaaaaacaatctccaaagctaagggccaacccagagaaccccaggtgtatacactgccccccagcagagaagagatgaccaaaaaccaggtcagcctgacatgtctcgtgaaaggattctatcctagcgacattgccgtggagtgggagtccaatggccagcctgagaataactataagaccaccccccctgtgctggactccgatggatccttcttcctctacagcaagctgacagtggataaaagcagatggcaacagggaaacgtgttcagctgtagcgtcatgcatgaagccctgcacaatcattatacccaaaaaagcctctccctgtctccaggaggtggtggaggaagcggaggtggcggtagtcaggtgcaactggtcgagtccggcggaggcgtcgtgcaacctggcaggagcctcagactctcctgtgctgctagcggcttcaccttttctagctacgccatgtcatggttccgtcaggctccaggcaagggacgagagttagttgcagccatcgatagcgacggaagtacatcctatgcagactccgtagaggggcgattcaccatctcccgggacaatgccaaaaggatggtctacttacagatgaatagccttcgtgccgaagataccgccgtgtattactgtgctagagtggatttctactattactacatggacgtgtggggccaaggaaccctggttacagtcagcagctaatag

SEQ ID NO: 8551 - DNA, 1743 bp, synthetic construct
  source 1..1743: mol_type = other DNA
gaggtgcaactggtagagagcggcgggggcttagtccagcctgggggctccctccggctgtcttgttccgcaagcggattcactttttcatccttcggcatgcactgggtcagacaagctccgggcaaaggacttgaatgggtggcatatatcagctcagggagttccaccatttactacggggacaccgttaaaggcaggttcacgattagtagggataatgccaagaattccctcttcctgcaaatgtctagccttagagccgaggatactgccgtttactactgtgcgcgagaagggggctactactacggacgctcatactacactatggattattggggccaagggacgaccgtaactgtaagctctgcatcaacgaaaggccctagtgtgtttcctctcgcacccagcagtaaaagcacctcagggggtactgctgccctgggctgccttgtgaaagattatttcccggaacctgttactgtgtcttggaatagcggcgctctcacctctggtgttcacacttttccggcagttttgcagtccagcggactttattccctttcatcagtcgtgaccgtcccaagttcctctctgggaacccagacatacatctgcaacgtgaaccacaaaccctctaacactaaggttgataagaaggtggaacctaagagctgcgacaaaacccacacatgtcctccctgtcctgcccctgaactgctgggcgggccttccgtgttcctgtttcctcctaagcctaaggatacactgatgattagcaggacacccgaggtcacctgcgtcgtggtcgacgtctcccacgaggaccctgaagtgaaatttaattggtatgtcgatggagtcgaggtccacaatgccaagaccaaacctagagaggaacaatataattccacatatagagtcgtgtccgtcctcacagtcctccaccaagattggctcaatggcaaagagtataaatgcaaagtgagcaataaggctctgcccgctcccattgaaaaaacaatctccaaagctaagggccaacccagagaaccccaggtgtatacactgccccccagcagagaagagatgaccaaaaaccaggtcagcctgacatgtctcgtgaaaggattctatcctagcgacattgccgtggagtgggagtccaatggccagcctgagaataactataagaccaccccccctgtgctggactccgatggatccttcttcctctacagcaagctgacagtggataaaagcagatggcaacagggaaacgtgttcagctgtagcgtcatgcatgaagccctgcacaatcattatacccaaaaaagcctctccctgtctccaggaggtggtggaggaagcggaggtggcggtagtcaggtgcaactggtcgagtccggcggaggcgtcgtgcaacctggcaggagcctcagactctcctgtgctgctagcggcgccacctctaatacatactacatgggatggttccgtcaggctccaggcaaggagcgagagggtgttgcaacaatccggagggacgacctgacagcctatacagactccgtaaaggggcgattcaccatctcccgggacaatacaaaaaacacactttacttacagatgaatagccttcgtgccgaagataccgccgtgtattactgtgctagactggatagcaacggctacagctactggggccaaggaaccctggttacagtcagcagctaatag

SEQ ID NO: 8552 - DNA, 1752 bp, synthetic construct
  source 1..1752: mol_type = other DNA
gaggtgcaactggtagagagcggcgggggcttagtccagcctgggggctccctccggctgtcttgttccgcaagcggattcactttttcatccttcggcatgcactgggtcagacaagctccgggcaaaggacttgaatgggtggcatatatcagctcagggagttccaccatttactacggggacaccgttaaaggcaggttcacgattagtagggataatgccaagaattccctcttcctgcaaatgtctagccttagagccgaggatactgccgtttactactgtgcgcgagaagggggctactactacggacgctcatactacactatggattattggggccaagggacgaccgtaactgtaagctctgcatcaacgaaaggccctagtgtgtttcctctcgcacccagcagtaaaagcacctcagggggtactgctgccctgggctgccttgtgaaagattatttcccggaacctgttactgtgtcttggaatagcggcgctctcacctctggtgttcacacttttccggcagttttgcagtccagcggactttattccctttcatcagtcgtgaccgtcccaagttcctctctgggaacccagacatacatctgcaacgtgaaccacaaaccctctaacactaaggttgataagaaggtggaacctaagagctgcgacaaaacccacacatgtcctccctgtcctgcccctgaactgctgggcgggccttccgtgttcctgtttcctcctaagcctaaggatacactgatgattagcaggacacccgaggtcacctgcgtcgtggtcgacgtctcccacgaggaccctgaagtgaaatttaattggtatgtcgatggagtcgaggtccacaatgccaagaccaaacctagagaggaacaatataattccacatatagagtcgtgtccgtcctcacagtcctccaccaagattggctcaatggcaaagagtataaatgcaaagtgagcaataaggctctgcccgctcccattgaaaaaacaatctccaaagctaagggccaacccagagaaccccaggtgtatacactgccccccagcagagaagagatgaccaaaaaccaggtcagcctgacatgtctcgtgaaaggattctatcctagcgacattgccgtggagtgggagtccaatggccagcctgagaataactataagaccaccccccctgtgctggactccgatggatccttcttcctctacagcaagctgacagtggataaaagcagatggcaacagggaaacgtgttcagctgtagcgtcatgcatgaagccctgcacaatcattatacccaaaaaagcctctccctgtctccaggaggtggtggaggaagcggaggtggcggtagtcaggtgcaactggtcgagtccggcggaggcgtcgtgcaacctggcaggagcctcagactctcctgtgctgctagcggcagatccaatgaaaactacttcctggcctggtaccgtcaggctccaggcaaggaccgagagggtgttgcagtgatctatagcgacggaaagacagtctatgcagactccgtaaaggggcgattcaccatctcccgggacaatagtaaaaacacactttacttacagatgaatagccttcgtgccgaagataccgccgtgtattactgtactgagtacggcttcaagaatggatacgcgttcgacgcctggggccaaggaaccctggttacagtcagcagctaatag

SEQ ID NO: 8553 - DNA, 1746 bp, synthetic construct
  source 1..1746: mol_type = other DNA
gaggtgcaactggtagagagcggcgggggcttagtccagcctgggggctccctccggctgtcttgttccgcaagcggattcactttttcatccttcggcatgcactgggtcagacaagctccgggcaaaggacttgaatgggtggcatatatcagctcagggagttccaccatttactacggggacaccgttaaaggcaggttcacgattagtagggataatgccaagaattccctcttcctgcaaatgtctagccttagagccgaggatactgccgtttactactgtgcgcgagaagggggctactactacggacgctcatactacactatggattattggggccaagggacgaccgtaactgtaagctctgcatcaacgaaaggccctagtgtgtttcctctcgcacccagcagtaaaagcacctcagggggtactgctgccctgggctgccttgtgaaagattatttcccggaacctgttactgtgtcttggaatagcggcgctctcacctctggtgttcacacttttccggcagttttgcagtccagcggactttattccctttcatcagtcgtgaccgtcccaagttcctctctgggaacccagacatacatctgcaacgtgaaccacaaaccctctaacactaaggttgataagaaggtggaacctaagagctgcgacaaaacccacacatgtcctccctgtcctgcccctgaactgctgggcgggccttccgtgttcctgtttcctcctaagcctaaggatacactgatgattagcaggacacccgaggtcacctgcgtcgtggtcgacgtctcccacgaggaccctgaagtgaaatttaattggtatgtcgatggagtcgaggtccacaatgccaagaccaaacctagagaggaacaatataattccacatatagagtcgtgtccgtcctcacagtcctccaccaagattggctcaatggcaaagagtataaatgcaaagtgagcaataaggctctgcccgctcccattgaaaaaacaatctccaaagctaagggccaacccagagaaccccaggtgtatacactgccccccagcagagaagagatgaccaaaaaccaggtcagcctgacatgtctcgtgaaaggattctatcctagcgacattgccgtggagtgggagtccaatggccagcctgagaataactataagaccaccccccctgtgctggactccgatggatccttcttcctctacagcaagctgacagtggataaaagcagatggcaacagggaaacgtgttcagctgtagcgtcatgcatgaagccctgcacaatcattatacccaaaaaagcctctccctgtctccaggaggtggtggaggaagcggaggtggcggtagtcaggtgcaactggtcgagtccggcggaggcgtcgtgcaacctggcaggagcctcagactctcctgtgctgctagcggcgccacctctaatacatactacatgggatggttccgtctggctccaggcaaggagcgagagggtgttgcaagtatctatacgcaggacggaagaaccgcttacgccgattcagtgaagggccggtttaccatttccgaggataacgctaagaacactgtgtatcttcaaatgaactccttacgggctgaagacaccgcagtctactattgtgccaggatcgacatcgatggatacgcgtactggggccaaggaaccctggttacagtcagcagctaatag

SEQ ID NO: 8554 - DNA, 1749 bp, synthetic construct
  source 1..1749: mol_type = other DNA
gaggtgcaactggtagagagcggcgggggcttagtccagcctgggggctccctccggctgtcttgttccgcaagcggattcactttttcatccttcggcatgcactgggtcagacaagctccgggcaaaggacttgaatgggtggcatatatcagctcagggagttccaccatttactacggggacaccgttaaaggcaggttcacgattagtagggataatgccaagaattccctcttcctgcaaatgtctagccttagagccgaggatactgccgtttactactgtgcgcgagaagggggctactactacggacgctcatactacactatggattattggggccaagggacgaccgtaactgtaagctctgcatcaacgaaaggccctagtgtgtttcctctcgcacccagcagtaaaagcacctcagggggtactgctgccctgggctgccttgtgaaagattatttcccggaacctgttactgtgtcttggaatagcggcgctctcacctctggtgttcacacttttccggcagttttgcagtccagcggactttattccctttcatcagtcgtgaccgtcccaagttcctctctgggaacccagacatacatctgcaacgtgaaccacaaaccctctaacactaaggttgataagaaggtggaacctaagagctgcgacaaaacccacacatgtcctccctgtcctgcccctgaactgctgggcgggccttccgtgttcctgtttcctcctaagcctaaggatacactgatgattagcaggacacccgaggtcacctgcgtcgtggtcgacgtctcccacgaggaccctgaagtgaaatttaattggtatgtcgatggagtcgaggtccacaatgccaagaccaaacctagagaggaacaatataattccacatatagagtcgtgtccgtcctcacagtcctccaccaagattggctcaatggcaaagagtataaatgcaaagtgagcaataaggctctgcccgctcccattgaaaaaacaatctccaaagctaagggccaacccagagaaccccaggtgtatacactgccccccagcagagaagagatgaccaaaaaccaggtcagcctgacatgtctcgtgaaaggattctatcctagcgacattgccgtggagtgggagtccaatggccagcctgagaataactataagaccaccccccctgtgctggactccgatggatccttcttcctctacagcaagctgacagtggataaaagcagatggcaacagggaaacgtgttcagctgtagcgtcatgcatgaagccctgcacaatcattatacccaaaaaagcctctccctgtctccaggaggtggtggaggaagcggaggtggcggtagtcaggtgcaactggtcgagtccggcggaggcgtcgtgcaacctggcaggagcctcagactctcctgtgctgctagcggcagttccgatgaaatctacgccatggcctggttccgtcaggctccaggcaagggacgagagttagttgcagccatcgaaaacgacggaacaacaacctatgcacactccgtaaaggggcgattcaccatctccgccgacactagtaaaaacacagcttacttacagatgaatagccttcgtgccgaagataccgccgtgtattactgtgctagagactcaacgtcatggtggtacttcgacctgtggggccaaggaaccctggttacagtcagcagctaatag

SEQ ID NO: 8555 - DNA, 1746 bp, synthetic construct
  source 1..1746: mol_type = other DNA
gaggtgcaactggtagagagcggcgggggcttagtccagcctgggggctccctccggctgtcttgttccgcaagcggattcactttttcatccttcggcatgcactgggtcagacaagctccgggcaaaggacttgaatgggtggcatatatcagctcagggagttccaccatttactacggggacaccgttaaaggcaggttcacgattagtagggataatgccaagaattccctcttcctgcaaatgtctagccttagagccgaggatactgccgtttactactgtgcgcgagaagggggctactactacggacgctcatactacactatggattattggggccaagggacgaccgtaactgtaagctctgcatcaacgaaaggccctagtgtgtttcctctcgcacccagcagtaaaagcacctcagggggtactgctgccctgggctgccttgtgaaagattatttcccggaacctgttactgtgtcttggaatagcggcgctctcacctctggtgttcacacttttccggcagttttgcagtccagcggactttattccctttcatcagtcgtgaccgtcccaagttcctctctgggaacccagacatacatctgcaacgtgaaccacaaaccctctaacactaaggttgataagaaggtggaacctaagagctgcgacaaaacccacacatgtcctccctgtcctgcccctgaactgctgggcgggccttccgtgttcctgtttcctcctaagcctaaggatacactgatgattagcaggacacccgaggtcacctgcgtcgtggtcgacgtctcccacgaggaccctgaagtgaaatttaattggtatgtcgatggagtcgaggtccacaatgccaagaccaaacctagagaggaacaatataattccacatatagagtcgtgtccgtcctcacagtcctccaccaagattggctcaatggcaaagagtataaatgcaaagtgagcaataaggctctgcccgctcccattgaaaaaacaatctccaaagctaagggccaacccagagaaccccaggtgtatacactgccccccagcagagaagagatgaccaaaaaccaggtcagcctgacatgtctcgtgaaaggattctatcctagcgacattgccgtggagtgggagtccaatggccagcctgagaataactataagaccaccccccctgtgctggactccgatggatccttcttcctctacagcaagctgacagtggataaaagcagatggcaacagggaaacgtgttcagctgtagcgtcatgcatgaagccctgcacaatcattatacccaaaaaagcctctccctgtctccaggaggtggtggaggaagcggaggtggcggtagtcaggtgcaactggtcgagtccggcggaggcgtcgtgcaacctggcaggagcctcagactctcctgtgctgctagcggcccatccgcttctgcaaaggccatggcctggttccgtcagtctgtgggcaaggagcgagagggtattgcagccatccggcacgacggaggagagacctggtacgccgcctcagtgaagggccggtttaccatttccagggataacgctaagaacactctgtatcttcaaatgaactccttacgggctgaagacaccgcagtctactattgtgtgagggatcacggcggcgccagggacatctggggccaaggaaccctggttacagtcagcagctaatag

SEQ ID NO: 8556 - DNA, 1749 bp, synthetic construct
  source 1..1749: mol_type = other DNA
gaggtgcaactggtagagagcggcgggggcttagtccagcctgggggctccctccggctgtcttgttccgcaagcggattcactttttcatccttcggcatgcactgggtcagacaagctccgggcaaaggacttgaatgggtggcatatatcagctcagggagttccaccatttactacggggacaccgttaaaggcaggttcacgattagtagggataatgccaagaattccctcttcctgcaaatgtctagccttagagccgaggatactgccgtttactactgtgcgcgagaagggggctactactacggacgctcatactacactatggattattggggccaagggacgaccgtaactgtaagctctgcatcaacgaaaggccctagtgtgtttcctctcgcacccagcagtaaaagcacctcagggggtactgctgccctgggctgccttgtgaaagattatttcccggaacctgttactgtgtcttggaatagcggcgctctcacctctggtgttcacacttttccggcagttttgcagtccagcggactttattccctttcatcagtcgtgaccgtcccaagttcctctctgggaacccagacatacatctgcaacgtgaaccacaaaccctctaacactaaggttgataagaaggtggaacctaagagctgcgacaaaacccacacatgtcctccctgtcctgcccctgaactgctgggcgggccttccgtgttcctgtttcctcctaagcctaaggatacactgatgattagcaggacacccgaggtcacctgcgtcgtggtcgacgtctcccacgaggaccctgaagtgaaatttaattggtatgtcgatggagtcgaggtccacaatgccaagaccaaacctagagaggaacaatataattccacatatagagtcgtgtccgtcctcacagtcctccaccaagattggctcaatggcaaagagtataaatgcaaagtgagcaataaggctctgcccgctcccattgaaaaaacaatctccaaagctaagggccaacccagagaaccccaggtgtatacactgccccccagcagagaagagatgaccaaaaaccaggtcagcctgacatgtctcgtgaaaggattctatcctagcgacattgccgtggagtgggagtccaatggccagcctgagaataactataagaccaccccccctgtgctggactccgatggatccttcttcctctacagcaagctgacagtggataaaagcagatggcaacagggaaacgtgttcagctgtagcgtcatgcatgaagccctgcacaatcattatacccaaaaaagcctctccctgtctccaggaggtggtggaggaagcggaggtggcggtagtcaggtgcaactggtcgagtccggcggaggcgtcgtgcaacctggcaggagcctcagactctcctgtgctgctagcggcctgtccgtttctgacagctcgatggcctggttccgtcagcgtccaggccaggagcgagagggtattgcagccatcgatacgggggacggaagtacctattacctcaattcagtggagggccggtttaccatttcccacgataacgctaagaacactctgtatcttcaaatgaactccttacgggctgaagacaccgcagtctactattgtgtgaggcagcagcgggatggactggtgaatttctggggccaaggaaccctggttacagtcagcagctaatag

SEQ ID NO: 8557 - DNA, 1752 bp, synthetic construct
  source 1..1752: mol_type = other DNA
gaggtgcaactggtagagagcggcgggggcttagtccagcctgggggctccctccggctgtcttgttccgcaagcggattcactttttcatccttcggcatgcactgggtcagacaagctccgggcaaaggacttgaatgggtggcatatatcagctcagggagttccaccatttactacggggacaccgttaaaggcaggttcacgattagtagggataatgccaagaattccctcttcctgcaaatgtctagccttagagccgaggatactgccgtttactactgtgcgcgagaagggggctactactacggacgctcatactacactatggattattggggccaagggacgaccgtaactgtaagctctgcatcaacgaaaggccctagtgtgtttcctctcgcacccagcagtaaaagcacctcagggggtactgctgccctgggctgccttgtgaaagattatttcccggaacctgttactgtgtcttggaatagcggcgctctcacctctggtgttcacacttttccggcagttttgcagtccagcggactttattccctttcatcagtcgtgaccgtcccaagttcctctctgggaacccagacatacatctgcaacgtgaaccacaaaccctctaacactaaggttgataagaaggtggaacctaagagctgcgacaaaacccacacatgtcctccctgtcctgcccctgaactgctgggcgggccttccgtgttcctgtttcctcctaagcctaaggatacactgatgattagcaggacacccgaggtcacctgcgtcgtggtcgacgtctcccacgaggaccctgaagtgaaatttaattggtatgtcgatggagtcgaggtccacaatgccaagaccaaacctagagaggaacaatataattccacatatagagtcgtgtccgtcctcacagtcctccaccaagattggctcaatggcaaagagtataaatgcaaagtgagcaataaggctctgcccgctcccattgaaaaaacaatctccaaagctaagggccaacccagagaaccccaggtgtatacactgccccccagcagagaagagatgaccaaaaaccaggtcagcctgacatgtctcgtgaaaggattctatcctagcgacattgccgtggagtgggagtccaatggccagcctgagaataactataagaccaccccccctgtgctggactccgatggatccttcttcctctacagcaagctgacagtggataaaagcagatggcaacagggaaacgtgttcagctgtagcgtcatgcatgaagccctgcacaatcattatacccaaaaaagcctctccctgtctccaggaggtggtggaggaagcggaggtggcggtagtcaggtgcaactggtcgagtccggcggaggcgtcgtgcaacctggcaggagcctcagactctcctgtgctgctagcggcttcaccgttggtgcaagggccatggcctggtaccgtcaggctccaggcaaggaccgagagggtgttgcagccatcgatagcgacggaatcgcatcctatgcagactccgtaaaggggcgattcaccatctcccgggacaatgccaaaaacacactttacttacagatgaatagccttcgtgccgaagataccgccgtgtattactgtgctagagtgtcagggtcatatggagactacttcgactactggggccaaggaaccctggttacagtcagcagctaatag

SEQ ID NO: 8558 - DNA, 1743 bp, synthetic construct
  source 1..1743: mol_type = other DNA
gaggtgcaactggtagagagcggcgggggcttagtccagcctgggggctccctccggctgtcttgttccgcaagcggattcactttttcatccttcggcatgcactgggtcagacaagctccgggcaaaggacttgaatgggtggcatatatcagctcagggagttccaccatttactacggggacaccgttaaaggcaggttcacgattagtagggataatgccaagaattccctcttcctgcaaatgtctagccttagagccgaggatactgccgtttactactgtgcgcgagaagggggctactactacggacgctcatactacactatggattattggggccaagggacgaccgtaactgtaagctctgcatcaacgaaaggccctagtgtgtttcctctcgcacccagcagtaaaagcacctcagggggtactgctgccctgggctgccttgtgaaagattatttcccggaacctgttactgtgtcttggaatagcggcgctctcacctctggtgttcacacttttccggcagttttgcagtccagcggactttattccctttcatcagtcgtgaccgtcccaagttcctctctgggaacccagacatacatctgcaacgtgaaccacaaaccctctaacactaaggttgataagaaggtggaacctaagagctgcgacaaaacccacacatgtcctccctgtcctgcccctgaactgctgggcgggccttccgtgttcctgtttcctcctaagcctaaggatacactgatgattagcaggacacccgaggtcacctgcgtcgtggtcgacgtctcccacgaggaccctgaagtgaaatttaattggtatgtcgatggagtcgaggtccacaatgccaagaccaaacctagagaggaacaatataattccacatatagagtcgtgtccgtcctcacagtcctccaccaagattggctcaatggcaaagagtataaatgcaaagtgagcaataaggctctgcccgctcccattgaaaaaacaatctccaaagctaagggccaacccagagaaccccaggtgtatacactgccccccagcagagaagagatgaccaaaaaccaggtcagcctgacatgtctcgtgaaaggattctatcctagcgacattgccgtggagtgggagtccaatggccagcctgagaataactataagaccaccccccctgtgctggactccgatggatccttcttcctctacagcaagctgacagtggataaaagcagatggcaacagggaaacgtgttcagctgtagcgtcatgcatgaagccctgcacaatcattatacccaaaaaagcctctccctgtctccaggaggtggtggaggaagcggaggtggcggtagtcaggtgcaactggtcgagtccggcggaggcgtcgtgcaacctggcaggagcctcagactctcctgtgctgctagcggctacacctttgatgagagcgacatgggatggttccgtcaggctccaggcaagggacgagagttagttagtacaatctccccggacggaacaacatattatgcagactccgtagaggggcgattcaccatctcccgggacaatgccaaaaggatggtctacttacagatgaatagccttcgtgccgaagataccgccgtgtattactgtgctagatggcggaggtcatggttcgacacgtggggccaaggaaccctggttacagtcagcagctaatag

SEQ ID NO: 8559 - DNA, 1749 bp, synthetic construct
  source 1..1749: mol_type = other DNA
gaggtgcaactggtagagagcggcgggggcttagtccagcctgggggctccctccggctgtcttgttccgcaagcggattcactttttcatccttcggcatgcactgggtcagacaagctccgggcaaaggacttgaatgggtggcatatatcagctcagggagttccaccatttactacggggacaccgttaaaggcaggttcacgattagtagggataatgccaagaattccctcttcctgcaaatgtctagccttagagccgaggatactgccgtttactactgtgcgcgagaagggggctactactacggacgctcatactacactatggattattggggccaagggacgaccgtaactgtaagctctgcatcaacgaaaggccctagtgtgtttcctctcgcacccagcagtaaaagcacctcagggggtactgctgccctgggctgccttgtgaaagattatttcccggaacctgttactgtgtcttggaatagcggcgctctcacctctggtgttcacacttttccggcagttttgcagtccagcggactttattccctttcatcagtcgtgaccgtcccaagttcctctctgggaacccagacatacatctgcaacgtgaaccacaaaccctctaacactaaggttgataagaaggtggaacctaagagctgcgacaaaacccacacatgtcctccctgtcctgcccctgaactgctgggcgggccttccgtgttcctgtttcctcctaagcctaaggatacactgatgattagcaggacacccgaggtcacctgcgtcgtggtcgacgtctcccacgaggaccctgaagtgaaatttaattggtatgtcgatggagtcgaggtccacaatgccaagaccaaacctagagaggaacaatataattccacatatagagtcgtgtccgtcctcacagtcctccaccaagattggctcaatggcaaagagtataaatgcaaagtgagcaataaggctctgcccgctcccattgaaaaaacaatctccaaagctaagggccaacccagagaaccccaggtgtatacactgccccccagcagagaagagatgaccaaaaaccaggtcagcctgacatgtctcgtgaaaggattctatcctagcgacattgccgtggagtgggagtccaatggccagcctgagaataactataagaccaccccccctgtgctggactccgatggatccttcttcctctacagcaagctgacagtggataaaagcagatggcaacagggaaacgtgttcagctgtagcgtcatgcatgaagccctgcacaatcattatacccaaaaaagcctctccctgtctccaggaggtggtggaggaagcggaggtggcggtagtcaggtgcaactggtcgagtccggcggaggcgtcgtgcaacctggcaggagcctcagactctcctgtgctgctagcggctacaccgttgctacatacttcatcggatggttccgtcaggctccaggcaaggcccgagagggtgttgcaacaatcaccagcgacggaagaacaaaatatgcagactccgtaaaggggcgattcaccatctcccgggacaatgccaaaaacacagtctacttacagatgaatagccttcgtgccgaagataccgccgtgtattactgtgctagtaggtcaatagccgccgccggggagggctactggggccaaggaaccctggttacagtcagcagctaatag

SEQ ID NO: 8560 - DNA, 1743 bp, synthetic construct
  source 1..1743: mol_type = other DNA
gaggtgcaactggtagagagcggcgggggcttagtccagcctgggggctccctccggctgtcttgttccgcaagcggattcactttttcatccttcggcatgcactgggtcagacaagctccgggcaaaggacttgaatgggtggcatatatcagctcagggagttccaccatttactacggggacaccgttaaaggcaggttcacgattagtagggataatgccaagaattccctcttcctgcaaatgtctagccttagagccgaggatactgccgtttactactgtgcgcgagaagggggctactactacggacgctcatactacactatggattattggggccaagggacgaccgtaactgtaagctctgcatcaacgaaaggccctagtgtgtttcctctcgcacccagcagtaaaagcacctcagggggtactgctgccctgggctgccttgtgaaagattatttcccggaacctgttactgtgtcttggaatagcggcgctctcacctctggtgttcacacttttccggcagttttgcagtccagcggactttattccctttcatcagtcgtgaccgtcccaagttcctctctgggaacccagacatacatctgcaacgtgaaccacaaaccctctaacactaaggttgataagaaggtggaacctaagagctgcgacaaaacccacacatgtcctccctgtcctgcccctgaactgctgggcgggccttccgtgttcctgtttcctcctaagcctaaggatacactgatgattagcaggacacccgaggtcacctgcgtcgtggtcgacgtctcccacgaggaccctgaagtgaaatttaattggtatgtcgatggagtcgaggtccacaatgccaagaccaaacctagagaggaacaatataattccacatatagagtcgtgtccgtcctcacagtcctccaccaagattggctcaatggcaaagagtataaatgcaaagtgagcaataaggctctgcccgctcccattgaaaaaacaatctccaaagctaagggccaacccagagaaccccaggtgtatacactgccccccagcagagaagagatgaccaaaaaccaggtcagcctgacatgtctcgtgaaaggattctatcctagcgacattgccgtggagtgggagtccaatggccagcctgagaataactataagaccaccccccctgtgctggactccgatggatccttcttcctctacagcaagctgacagtggataaaagcagatggcaacagggaaacgtgttcagctgtagcgtcatgcatgaagccctgcacaatcattatacccaaaaaagcctctccctgtctccaggaggtggtggaggaagcggaggtggcggtagtcaggtgcaactggtcgagtccggcggaggcgtcgtgcaacctggcaggagcctcagactctcctgtgctgctagcggctacccttcttgtatggggtgggcacggcaggcacctgggaaaggattggagtgggtcgcctgtattgagagaagaggcaggatacactacgcagcctctgtgaagggccggttcacgatttcgcgagacaattccaagaatacattgtacctgcaaatgaattccttgcgggcagaagataccgctgtttactattgcgctagccaggatagtagctcatacgacgccttcgacatatggggccaaggaaccctggttacagtcagcagctaatag

SEQ ID NO: 8561 - DNA, 1746 bp, synthetic construct
  source 1..1746: mol_type = other DNA
gaggtgcaactggtagagagcggcgggggcttagtccagcctgggggctccctccggctgtcttgttccgcaagcggattcactttttcatccttcggcatgcactgggtcagacaagctccgggcaaaggacttgaatgggtggcatatatcagctcagggagttccaccatttactacggggacaccgttaaaggcaggttcacgattagtagggataatgccaagaattccctcttcctgcaaatgtctagccttagagccgaggatactgccgtttactactgtgcgcgagaagggggctactactacggacgctcatactacactatggattattggggccaagggacgaccgtaactgtaagctctgcatcaacgaaaggccctagtgtgtttcctctcgcacccagcagtaaaagcacctcagggggtactgctgccctgggctgccttgtgaaagattatttcccggaacctgttactgtgtcttggaatagcggcgctctcacctctggtgttcacacttttccggcagttttgcagtccagcggactttattccctttcatcagtcgtgaccgtcccaagttcctctctgggaacccagacatacatctgcaacgtgaaccacaaaccctctaacactaaggttgataagaaggtggaacctaagagctgcgacaaaacccacacatgtcctccctgtcctgcccctgaactgctgggcgggccttccgtgttcctgtttcctcctaagcctaaggatacactgatgattagcaggacacccgaggtcacctgcgtcgtggtcgacgtctcccacgaggaccctgaagtgaaatttaattggtatgtcgatggagtcgaggtccacaatgccaagaccaaacctagagaggaacaatataattccacatatagagtcgtgtccgtcctcacagtcctccaccaagattggctcaatggcaaagagtataaatgcaaagtgagcaataaggctctgcccgctcccattgaaaaaacaatctccaaagctaagggccaacccagagaaccccaggtgtatacactgccccccagcagagaagagatgaccaaaaaccaggtcagcctgacatgtctcgtgaaaggattctatcctagcgacattgccgtggagtgggagtccaatggccagcctgagaataactataagaccaccccccctgtgctggactccgatggatccttcttcctctacagcaagctgacagtggataaaagcagatggcaacagggaaacgtgttcagctgtagcgtcatgcatgaagccctgcacaatcattatacccaaaaaagcctctccctgtctccaggaggtggtggaggaagcggaggtggcggtagtcaggtgcaactggtcgagtccggcggaggcgtcgtgcaacctggcaggagcctcagactctcctgtgctgctagcggcggagcctatcgtaagtactacatgggatggttccgtcaggctccaggcaagggacgagagttagttgcagccatcgaaagcgacggaacaacagattatgcagactccgtagaggggcgattcaccatctcccgggacaatgccaaaaggatggtctacttacagatgaatagccttcgtgccgaagataccgccgtgtattactgtgctagtgtgatcgggggcaatagtgaggactactggggccaaggaaccctggttacagtcagcagctaatag

SEQ ID NO: 8562 - DNA, 1770 bp, synthetic construct
  source 1..1770: mol_type = other DNA
gaggtgcaactggtagagagcggcgggggcttagtccagcctgggggctccctccggctgtcttgttccgcaagcggattcactttttcatccttcggcatgcactgggtcagacaagctccgggcaaaggacttgaatgggtggcatatatcagctcagggagttccaccatttactacggggacaccgttaaaggcaggttcacgattagtagggataatgccaagaattccctcttcctgcaaatgtctagccttagagccgaggatactgccgtttactactgtgcgcgagaagggggctactactacggacgctcatactacactatggattattggggccaagggacgaccgtaactgtaagctctgcatcaacgaaaggccctagtgtgtttcctctcgcacccagcagtaaaagcacctcagggggtactgctgccctgggctgccttgtgaaagattatttcccggaacctgttactgtgtcttggaatagcggcgctctcacctctggtgttcacacttttccggcagttttgcagtccagcggactttattccctttcatcagtcgtgaccgtcccaagttcctctctgggaacccagacatacatctgcaacgtgaaccacaaaccctctaacactaaggttgataagaaggtggaacctaagagctgcgacaaaacccacacatgtcctccctgtcctgcccctgaactgctgggcgggccttccgtgttcctgtttcctcctaagcctaaggatacactgatgattagcaggacacccgaggtcacctgcgtcgtggtcgacgtctcccacgaggaccctgaagtgaaatttaattggtatgtcgatggagtcgaggtccacaatgccaagaccaaacctagagaggaacaatataattccacatatagagtcgtgtccgtcctcacagtcctccaccaagattggctcaatggcaaagagtataaatgcaaagtgagcaataaggctctgcccgctcccattgaaaaaacaatctccaaagctaagggccaacccagagaaccccaggtgtatacactgccccccagcagagaagagatgaccaaaaaccaggtcagcctgacatgtctcgtgaaaggattctatcctagcgacattgccgtggagtgggagtccaatggccagcctgagaataactataagaccaccccccctgtgctggactccgatggatccttcttcctctacagcaagctgacagtggataaaagcagatggcaacagggaaacgtgttcagctgtagcgtcatgcatgaagccctgcacaatcattatacccaaaaaagcctctccctgtctccaggaggtggtggaggaagcggaggtggcggtagtcaggtgcaactggtcgagtccggcggaggcgtcgtgcaacctggcaggagcctcagactctcctgtgctgctagcggcgacgccaatgaattcgagtggatcggatggtaccgtcaggctccaggcaagggacgagagttagttgcaagaatcggcagcagcggaccaagatatgctgactcagtcgaggggaggtttaccatttcgcgagataactccaagaatacactgtatctgcaaatgaattcactgcgcgctgaagatactgccgtctactattgcgccgctacacactgtagcttcctcacaacgagcgtagcaggctgcacagatgacaagtactggggccaaggaaccctggttacagtcagcagctaatag

SEQ ID NO: 8563 - DNA, 1752 bp, synthetic construct
  source 1..1752: mol_type = other DNA
gaggtgcaactggtagagagcggcgggggcttagtccagcctgggggctccctccggctgtcttgttccgcaagcggattcactttttcatccttcggcatgcactgggtcagacaagctccgggcaaaggacttgaatgggtggcatatatcagctcagggagttccaccatttactacggggacaccgttaaaggcaggttcacgattagtagggataatgccaagaattccctcttcctgcaaatgtctagccttagagccgaggatactgccgtttactactgtgcgcgagaagggggctactactacggacgctcatactacactatggattattggggccaagggacgaccgtaactgtaagctctgcatcaacgaaaggccctagtgtgtttcctctcgcacccagcagtaaaagcacctcagggggtactgctgccctgggctgccttgtgaaagattatttcccggaacctgttactgtgtcttggaatagcggcgctctcacctctggtgttcacacttttccggcagttttgcagtccagcggactttattccctttcatcagtcgtgaccgtcccaagttcctctctgggaacccagacatacatctgcaacgtgaaccacaaaccctctaacactaaggttgataagaaggtggaacctaagagctgcgacaaaacccacacatgtcctccctgtcctgcccctgaactgctgggcgggccttccgtgttcctgtttcctcctaagcctaaggatacactgatgattagcaggacacccgaggtcacctgcgtcgtggtcgacgtctcccacgaggaccctgaagtgaaatttaattggtatgtcgatggagtcgaggtccacaatgccaagaccaaacctagagaggaacaatataattccacatatagagtcgtgtccgtcctcacagtcctccaccaagattggctcaatggcaaagagtataaatgcaaagtgagcaataaggctctgcccgctcccattgaaaaaacaatctccaaagctaagggccaacccagagaaccccaggtgtatacactgccccccagcagagaagagatgaccaaaaaccaggtcagcctgacatgtctcgtgaaaggattctatcctagcgacattgccgtggagtgggagtccaatggccagcctgagaataactataagaccaccccccctgtgctggactccgatggatccttcttcctctacagcaagctgacagtggataaaagcagatggcaacagggaaacgtgttcagctgtagcgtcatgcatgaagccctgcacaatcattatacccaaaaaagcctctccctgtctccaggaggtggtggaggaagcggaggtggcggtagtcaggtgcaactggtcgagtccggcggaggcgtcgtgcaacctggcaggagcctcagactctcctgtgctgctagcggcttcaccttaggtacaaactgcatggcctggttccgtcaggctccaggcaaggagcgagagcgtgttgcaagtatcggcagcgacggaagaacatattatgcagactccgtaaaggggcgattcaccatctcccgggacaatagtaaaaacacactttacttacagatgaatagccttcgtgccgaagataccgccgtgtattactgtgctagagcgcccgggatccagctgtggaagttcgactactggggccaaggaaccctggttacagtcagcagctaatag

SEQ ID NO: 8564 - DNA, 1752 bp, synthetic construct
  source 1..1752: mol_type = other DNA
gaggtgcaactggtagagagcggcgggggcttagtccagcctgggggctccctccggctgtcttgttccgcaagcggattcactttttcatccttcggcatgcactgggtcagacaagctccgggcaaaggacttgaatgggtggcatatatcagctcagggagttccaccatttactacggggacaccgttaaaggcaggttcacgattagtagggataatgccaagaattccctcttcctgcaaatgtctagccttagagccgaggatactgccgtttactactgtgcgcgagaagggggctactactacggacgctcatactacactatggattattggggccaagggacgaccgtaactgtaagctctgcatcaacgaaaggccctagtgtgtttcctctcgcacccagcagtaaaagcacctcagggggtactgctgccctgggctgccttgtgaaagattatttcccggaacctgttactgtgtcttggaatagcggcgctctcacctctggtgttcacacttttccggcagttttgcagtccagcggactttattccctttcatcagtcgtgaccgtcccaagttcctctctgggaacccagacatacatctgcaacgtgaaccacaaaccctctaacactaaggttgataagaaggtggaacctaagagctgcgacaaaacccacacatgtcctccctgtcctgcccctgaactgctgggcgggccttccgtgttcctgtttcctcctaagcctaaggatacactgatgattagcaggacacccgaggtcacctgcgtcgtggtcgacgtctcccacgaggaccctgaagtgaaatttaattggtatgtcgatggagtcgaggtccacaatgccaagaccaaacctagagaggaacaatataattccacatatagagtcgtgtccgtcctcacagtcctccaccaagattggctcaatggcaaagagtataaatgcaaagtgagcaataaggctctgcccgctcccattgaaaaaacaatctccaaagctaagggccaacccagagaaccccaggtgtatacactgccccccagcagagaagagatgaccaaaaaccaggtcagcctgacatgtctcgtgaaaggattctatcctagcgacattgccgtggagtgggagtccaatggccagcctgagaataactataagaccaccccccctgtgctggactccgatggatccttcttcctctacagcaagctgacagtggataaaagcagatggcaacagggaaacgtgttcagctgtagcgtcatgcatgaagccctgcacaatcattatacccaaaaaagcctctccctgtctccaggaggtggtggaggaagcggaggtggcggtagtcaggtgcaactggtcgagtccggcggaggcgtcgtgcaacctggcaggagcctcagactctcctgtgctgctagcggcttcaccaattctaagacgtacctgggatgggtgcgtagggctccaggcaagggacttgagtgggttgcagccatcgccccgagcacaggaagtacctattacgacgattcagtgaagggccggtttaccatttccagggataactctaagaacactctgtatcttcaaatgaactccttacgggctgaagacaccgcagtctactattgtgccagccaggggtcatcatggtacgagaatgactactggggccaaggaaccctggttacagtcagcagctaatag

SEQ ID NO: 8565 - DNA, 1752 bp, synthetic construct
  source 1..1752: mol_type = other DNA
gaggtgcaactggtagagagcggcgggggcttagtccagcctgggggctccctccggctgtcttgttccgcaagcggattcactttttcatccttcggcatgcactgggtcagacaagctccgggcaaaggacttgaatgggtggcatatatcagctcagggagttccaccatttactacggggacaccgttaaaggcaggttcacgattagtagggataatgccaagaattccctcttcctgcaaatgtctagccttagagccgaggatactgccgtttactactgtgcgcgagaagggggctactactacggacgctcatactacactatggattattggggccaagggacgaccgtaactgtaagctctgcatcaacgaaaggccctagtgtgtttcctctcgcacccagcagtaaaagcacctcagggggtactgctgccctgggctgccttgtgaaagattatttcccggaacctgttactgtgtcttggaatagcggcgctctcacctctggtgttcacacttttccggcagttttgcagtccagcggactttattccctttcatcagtcgtgaccgtcccaagttcctctctgggaacccagacatacatctgcaacgtgaaccacaaaccctctaacactaaggttgataagaaggtggaacctaagagctgcgacaaaacccacacatgtcctccctgtcctgcccctgaactgctgggcgggccttccgtgttcctgtttcctcctaagcctaaggatacactgatgattagcaggacacccgaggtcacctgcgtcgtggtcgacgtctcccacgaggaccctgaagtgaaatttaattggtatgtcgatggagtcgaggtccacaatgccaagaccaaacctagagaggaacaatataattccacatatagagtcgtgtccgtcctcacagtcctccaccaagattggctcaatggcaaagagtataaatgcaaagtgagcaataaggctctgcccgctcccattgaaaaaacaatctccaaagctaagggccaacccagagaaccccaggtgtatacactgccccccagcagagaagagatgaccaaaaaccaggtcagcctgacatgtctcgtgaaaggattctatcctagcgacattgccgtggagtgggagtccaatggccagcctgagaataactataagaccaccccccctgtgctggactccgatggatccttcttcctctacagcaagctgacagtggataaaagcagatggcaacagggaaacgtgttcagctgtagcgtcatgcatgaagccctgcacaatcattatacccaaaaaagcctctccctgtctccaggaggtggtggaggaagcggaggtggcggtagtcaggtgcaactggtcgagtccggcggaggcgtcgtgcaacctggcaggagcctcagactctcctgtgctgctagcggcttccgatttgatgactacgccatgggatggttccgtcaggctccaggcaaggagcgagagggtgttgcaggatacaaaagcgacggaagtacaacctatgcagactccgtaaaggggcgattcaccatctcccgggacaatagtaaaaacacactttacttacagatgaatagccttcgtgccgaagataccgccgtgtattactgtgctagtagggccctgtacggcggaaagccgttcgtgatctggggccaaggaaccctggttacagtcagcagctaatag

SEQ ID NO: 8566 - DNA, 1776 bp, synthetic construct
  source 1..1776: mol_type = other DNA
gaggtgcaactggtagagagcggcgggggcttagtccagcctgggggctccctccggctgtcttgttccgcaagcggattcactttttcatccttcggcatgcactgggtcagacaagctccgggcaaaggacttgaatgggtggcatatatcagctcagggagttccaccatttactacggggacaccgttaaaggcaggttcacgattagtagggataatgccaagaattccctcttcctgcaaatgtctagccttagagccgaggatactgccgtttactactgtgcgcgagaagggggctactactacggacgctcatactacactatggattattggggccaagggacgaccgtaactgtaagctctgcatcaacgaaaggccctagtgtgtttcctctcgcacccagcagtaaaagcacctcagggggtactgctgccctgggctgccttgtgaaagattatttcccggaacctgttactgtgtcttggaatagcggcgctctcacctctggtgttcacacttttccggcagttttgcagtccagcggactttattccctttcatcagtcgtgaccgtcccaagttcctctctgggaacccagacatacatctgcaacgtgaaccacaaaccctctaacactaaggttgataagaaggtggaacctaagagctgcgacaaaacccacacatgtcctccctgtcctgcccctgaactgctgggcgggccttccgtgttcctgtttcctcctaagcctaaggatacactgatgattagcaggacacccgaggtcacctgcgtcgtggtcgacgtctcccacgaggaccctgaagtgaaatttaattggtatgtcgatggagtcgaggtccacaatgccaagaccaaacctagagaggaacaatataattccacatatagagtcgtgtccgtcctcacagtcctccaccaagattggctcaatggcaaagagtataaatgcaaagtgagcaataaggctctgcccgctcccattgaaaaaacaatctccaaagctaagggccaacccagagaaccccaggtgtatacactgccccccagcagagaagagatgaccaaaaaccaggtcagcctgacatgtctcgtgaaaggattctatcctagcgacattgccgtggagtgggagtccaatggccagcctgagaataactataagaccaccccccctgtgctggactccgatggatccttcttcctctacagcaagctgacagtggataaaagcagatggcaacagggaaacgtgttcagctgtagcgtcatgcatgaagccctgcacaatcattatacccaaaaaagcctctccctgtctccaggaggtggtggaggaagcggaggtggcggtagtcaggtgcaactggtcgagtccggcggaggcgtcgtgcaacctggcaggagcctcagactctcctgtgctgctagcggcagtcctgatcgtagggcgtgcatgggatggtaccgtcaggctccaggcaaggagcgagagcgtgttgcagagatcgatacggacggaaacacatcctatgcagactccgtaaaggggcgattcaccatctcccgggacaatagtaaaaacacagtctacttacagatgaatagccttcgtgccgaagataccgccgtgtattactgtgctctgcagcccgggtgccccccagcgacgctcttctactggagaaaaacaggattcggtaactggggccaaggaaccctggttacagtcagcagctaatag

SEQ ID NO: 8567 - DNA, 1761 bp, synthetic construct
  source 1..1761: mol_type = other DNA
gaggtgcaactggtagagagcggcgggggcttagtccagcctgggggctccctccggctgtcttgttccgcaagcggattcactttttcatccttcggcatgcactgggtcagacaagctccgggcaaaggacttgaatgggtggcatatatcagctcagggagttccaccatttactacggggacaccgttaaaggcaggttcacgattagtagggataatgccaagaattccctcttcctgcaaatgtctagccttagagccgaggatactgccgtttactactgtgcgcgagaagggggctactactacggacgctcatactacactatggattattggggccaagggacgaccgtaactgtaagctctgcatcaacgaaaggccctagtgtgtttcctctcgcacccagcagtaaaagcacctcagggggtactgctgccctgggctgccttgtgaaagattatttcccggaacctgttactgtgtcttggaatagcggcgctctcacctctggtgttcacacttttccggcagttttgcagtccagcggactttattccctttcatcagtcgtgaccgtcccaagttcctctctgggaacccagacatacatctgcaacgtgaaccacaaaccctctaacactaaggttgataagaaggtggaacctaagagctgcgacaaaacccacacatgtcctccctgtcctgcccctgaactgctgggcgggccttccgtgttcctgtttcctcctaagcctaaggatacactgatgattagcaggacacccgaggtcacctgcgtcgtggtcgacgtctcccacgaggaccctgaagtgaaatttaattggtatgtcgatggagtcgaggtccacaatgccaagaccaaacctagagaggaacaatataattccacatatagagtcgtgtccgtcctcacagtcctccaccaagattggctcaatggcaaagagtataaatgcaaagtgagcaataaggctctgcccgctcccattgaaaaaacaatctccaaagctaagggccaacccagagaaccccaggtgtatacactgccccccagcagagaagagatgaccaaaaaccaggtcagcctgacatgtctcgtgaaaggattctatcctagcgacattgccgtggagtgggagtccaatggccagcctgagaataactataagaccaccccccctgtgctggactccgatggatccttcttcctctacagcaagctgacagtggataaaagcagatggcaacagggaaacgtgttcagctgtagcgtcatgcatgaagccctgcacaatcattatacccaaaaaagcctctccctgtctccaggaggtggtggaggaagcggaggtggcggtagtcaggtgcaactggtcgagtccggcggaggcgtcgtgcaacctggcaggagcctcagactctcctgtgctgctagcggcttcacctttgatgacacggacatgggatggttccgtcaggctccaggcaaggagcgagagcgtgttagtacaatcaatagcgacggaggaacaacctattacgccgattcagtgaagggccggtttaccatttccagggataactctaagaacactctgtatcttcaaatgaactccttacgggctgaagacaccgcagtctactattgtgccagggccagggtaaccgacgcggggtggcagtacttcgactattggggccaaggaaccctggttacagtcagcagctaatag

SEQ ID NO: 8568 - DNA, 1746 bp, synthetic construct
  source 1..1746: mol_type = other DNA
gaggtgcaactggtagagagcggcgggggcttagtccagcctgggggctccctccggctgtcttgttccgcaagcggattcactttttcatccttcggcatgcactgggtcagacaagctccgggcaaaggacttgaatgggtggcatatatcagctcagggagttccaccatttactacggggacaccgttaaaggcaggttcacgattagtagggataatgccaagaattccctcttcctgcaaatgtctagccttagagccgaggatactgccgtttactactgtgcgcgagaagggggctactactacggacgctcatactacactatggattattggggccaagggacgaccgtaactgtaagctctgcatcaacgaaaggccctagtgtgtttcctctcgcacccagcagtaaaagcacctcagggggtactgctgccctgggctgccttgtgaaagattatttcccggaacctgttactgtgtcttggaatagcggcgctctcacctctggtgttcacacttttccggcagttttgcagtccagcggactttattccctttcatcagtcgtgaccgtcccaagttcctctctgggaacccagacatacatctgcaacgtgaaccacaaaccctctaacactaaggttgataagaaggtggaacctaagagctgcgacaaaacccacacatgtcctccctgtcctgcccctgaactgctgggcgggccttccgtgttcctgtttcctcctaagcctaaggatacactgatgattagcaggacacccgaggtcacctgcgtcgtggtcgacgtctcccacgaggaccctgaagtgaaatttaattggtatgtcgatggagtcgaggtccacaatgccaagaccaaacctagagaggaacaatataattccacatatagagtcgtgtccgtcctcacagtcctccaccaagattggctcaatggcaaagagtataaatgcaaagtgagcaataaggctctgcccgctcccattgaaaaaacaatctccaaagctaagggccaacccagagaaccccaggtgtatacactgccccccagcagagaagagatgaccaaaaaccaggtcagcctgacatgtctcgtgaaaggattctatcctagcgacattgccgtggagtgggagtccaatggccagcctgagaataactataagaccaccccccctgtgctggactccgatggatccttcttcctctacagcaagctgacagtggataaaagcagatggcaacagggaaacgtgttcagctgtagcgtcatgcatgaagccctgcacaatcattatacccaaaaaagcctctccctgtctccaggaggtggtggaggaagcggaggtggcggtagtcaggtgcaactggtcgagtccggcggaggcgtcgtgcaacctggcaggagcctcagactctcctgtgctgctagcggcttcaccttttctgactactacatcggatggttccgtcaggctccaggcaaggagcgagagcgtgttgcacagatcgataagaacggagtgacaaattatgcagacgccgtaaaggggcgattcaccatctcccgggacaatagtaaaaacacactttacttacagatgaatagccttcgtgccgaagataccgccgtgtattactgtgctggagtggatgcgttcaattacatggaggtatggggccaaggaaccctggttacagtcagcagctaatag

SEQ ID NO: 8569 - DNA, 1758 bp, synthetic construct
  source 1..1758: mol_type = other DNA
gaggtgcaactggtagagagcggcgggggcttagtccagcctgggggctccctccggctgtcttgttccgcaagcggattcactttttcatccttcggcatgcactgggtcagacaagctccgggcaaaggacttgaatgggtggcatatatcagctcagggagttccaccatttactacggggacaccgttaaaggcaggttcacgattagtagggataatgccaagaattccctcttcctgcaaatgtctagccttagagccgaggatactgccgtttactactgtgcgcgagaagggggctactactacggacgctcatactacactatggattattggggccaagggacgaccgtaactgtaagctctgcatcaacgaaaggccctagtgtgtttcctctcgcacccagcagtaaaagcacctcagggggtactgctgccctgggctgccttgtgaaagattatttcccggaacctgttactgtgtcttggaatagcggcgctctcacctctggtgttcacacttttccggcagttttgcagtccagcggactttattccctttcatcagtcgtgaccgtcccaagttcctctctgggaacccagacatacatctgcaacgtgaaccacaaaccctctaacactaaggttgataagaaggtggaacctaagagctgcgacaaaacccacacatgtcctccctgtcctgcccctgaactgctgggcgggccttccgtgttcctgtttcctcctaagcctaaggatacactgatgattagcaggacacccgaggtcacctgcgtcgtggtcgacgtctcccacgaggaccctgaagtgaaatttaattggtatgtcgatggagtcgaggtccacaatgccaagaccaaacctagagaggaacaatataattccacatatagagtcgtgtccgtcctcacagtcctccaccaagattggctcaatggcaaagagtataaatgcaaagtgagcaataaggctctgcccgctcccattgaaaaaacaatctccaaagctaagggccaacccagagaaccccaggtgtatacactgccccccagcagagaagagatgaccaaaaaccaggtcagcctgacatgtctcgtgaaaggattctatcctagcgacattgccgtggagtgggagtccaatggccagcctgagaataactataagaccaccccccctgtgctggactccgatggatccttcttcctctacagcaagctgacagtggataaaagcagatggcaacagggaaacgtgttcagctgtagcgtcatgcatgaagccctgcacaatcattatacccaaaaaagcctctccctgtctccaggaggtggtggaggaagcggaggtggcggtagtcaggtgcaactggtcgagtccggcggaggcgtcgtgcaacctggcaggagcctcagactctcctgtgctgctagcggcgactttaatgatgcaagggccgagtgggggtggtttaggcaagcacctgggaagggccgggaattggtggccagtctcgcgagcgacggaagtaccatttacgccaatcccgtggagggccggtttaccatttccagggataacgctaagaacactctgtatcttcaaatgaactccttacgggctgaagacaccgcagtctactattgtgccaggtcaggggcctcaagtagctggtactggttcgactactggggccaaggaaccctggttacagtcagcagctaatag

SEQ ID NO: 8570 - DNA, 1749 bp, synthetic construct
  source 1..1749: mol_type = other DNA
gaggtgcaactggtagagagcggcgggggcttagtccagcctgggggctccctccggctgtcttgttccgcaagcggattcactttttcatccttcggcatgcactgggtcagacaagctccgggcaaaggacttgaatgggtggcatatatcagctcagggagttccaccatttactacggggacaccgttaaaggcaggttcacgattagtagggataatgccaagaattccctcttcctgcaaatgtctagccttagagccgaggatactgccgtttactactgtgcgcgagaagggggctactactacggacgctcatactacactatggattattggggccaagggacgaccgtaactgtaagctctgcatcaacgaaaggccctagtgtgtttcctctcgcacccagcagtaaaagcacctcagggggtactgctgccctgggctgccttgtgaaagattatttcccggaacctgttactgtgtcttggaatagcggcgctctcacctctggtgttcacacttttccggcagttttgcagtccagcggactttattccctttcatcagtcgtgaccgtcccaagttcctctctgggaacccagacatacatctgcaacgtgaaccacaaaccctctaacactaaggttgataagaaggtggaacctaagagctgcgacaaaacccacacatgtcctccctgtcctgcccctgaactgctgggcgggccttccgtgttcctgtttcctcctaagcctaaggatacactgatgattagcaggacacccgaggtcacctgcgtcgtggtcgacgtctcccacgaggaccctgaagtgaaatttaattggtatgtcgatggagtcgaggtccacaatgccaagaccaaacctagagaggaacaatataattccacatatagagtcgtgtccgtcctcacagtcctccaccaagattggctcaatggcaaagagtataaatgcaaagtgagcaataaggctctgcccgctcccattgaaaaaacaatctccaaagctaagggccaacccagagaaccccaggtgtatacactgccccccagcagagaagagatgaccaaaaaccaggtcagcctgacatgtctcgtgaaaggattctatcctagcgacattgccgtggagtgggagtccaatggccagcctgagaataactataagaccaccccccctgtgctggactccgatggatccttcttcctctacagcaagctgacagtggataaaagcagatggcaacagggaaacgtgttcagctgtagcgtcatgcatgaagccctgcacaatcattatacccaaaaaagcctctccctgtctccaggaggtggtggaggaagcggaggtggcggtagtcaggtgcaactggtcgagtccggcggaggcgtcgtgcaacctggcaggagcctcagactctcctgtgctgctagcggcagtattcataataggaggcacatgggatggttccgtcaggctgcaggcaaggagcgagagggtgttgcagccatcgatatagcgggaaacacacggattagtgactccgtaaaggggcgattcaccatctcccatgacaaagacgaaaacagactttacttacagatgaatagccttcgtgccgaagataccgccgtgtattactgtgctatccagtcaagcgacggcagagggacggtatactggggccaaggaaccctggttacagtcagcagctaatag

SEQ ID NO: 8571 - DNA, 1752 bp, synthetic construct
  source 1..1752: mol_type = other DNA
gaggtgcaactggtagagagcggcgggggcttagtccagcctgggggctccctccggctgtcttgttccgcaagcggattcactttttcatccttcggcatgcactgggtcagacaagctccgggcaaaggacttgaatgggtggcatatatcagctcagggagttccaccatttactacggggacaccgttaaaggcaggttcacgattagtagggataatgccaagaattccctcttcctgcaaatgtctagccttagagccgaggatactgccgtttactactgtgcgcgagaagggggctactactacggacgctcatactacactatggattattggggccaagggacgaccgtaactgtaagctctgcatcaacgaaaggccctagtgtgtttcctctcgcacccagcagtaaaagcacctcagggggtactgctgccctgggctgccttgtgaaagattatttcccggaacctgttactgtgtcttggaatagcggcgctctcacctctggtgttcacacttttccggcagttttgcagtccagcggactttattccctttcatcagtcgtgaccgtcccaagttcctctctgggaacccagacatacatctgcaacgtgaaccacaaaccctctaacactaaggttgataagaaggtggaacctaagagctgcgacaaaacccacacatgtcctccctgtcctgcccctgaactgctgggcgggccttccgtgttcctgtttcctcctaagcctaaggatacactgatgattagcaggacacccgaggtcacctgcgtcgtggtcgacgtctcccacgaggaccctgaagtgaaatttaattggtatgtcgatggagtcgaggtccacaatgccaagaccaaacctagagaggaacaatataattccacatatagagtcgtgtccgtcctcacagtcctccaccaagattggctcaatggcaaagagtataaatgcaaagtgagcaataaggctctgcccgctcccattgaaaaaacaatctccaaagctaagggccaacccagagaaccccaggtgtatacactgccccccagcagagaagagatgaccaaaaaccaggtcagcctgacatgtctcgtgaaaggattctatcctagcgacattgccgtggagtgggagtccaatggccagcctgagaataactataagaccaccccccctgtgctggactccgatggatccttcttcctctacagcaagctgacagtggataaaagcagatggcaacagggaaacgtgttcagctgtagcgtcatgcatgaagccctgcacaatcattatacccaaaaaagcctctccctgtctccaggaggtggtggaggaagcggaggtggcggtagtcaggtgcaactggtcgagtccggcggaggcgtcgtgcaacctggcaggagcctcagactctcctgtgctgctagcggcagacgaggtaataactactcgatggcctggtaccgtcaggctccaggcaaggaccgagagggtgttgcagccatcgatagcgacggagacacatcctatgcagaccccgtaaaggggcgattcaccatctcccgggacaatagtaaaaacacactttacttacagatgaatagccttcgtgccgaagataccgccgtgtattactgtgctgtggcgaccggggagtatagaaggtacttcgacgtatggggccaaggaaccctggttacagtcagcagctaatag

SEQ ID NO: 8572 - DNA, 1749 bp, synthetic construct
  source 1..1749: mol_type = other DNA
gaggtgcaactggtagagagcggcgggggcttagtccagcctgggggctccctccggctgtcttgttccgcaagcggattcactttttcatccttcggcatgcactgggtcagacaagctccgggcaaaggacttgaatgggtggcatatatcagctcagggagttccaccatttactacggggacaccgttaaaggcaggttcacgattagtagggataatgccaagaattccctcttcctgcaaatgtctagccttagagccgaggatactgccgtttactactgtgcgcgagaagggggctactactacggacgctcatactacactatggattattggggccaagggacgaccgtaactgtaagctctgcatcaacgaaaggccctagtgtgtttcctctcgcacccagcagtaaaagcacctcagggggtactgctgccctgggctgccttgtgaaagattatttcccggaacctgttactgtgtcttggaatagcggcgctctcacctctggtgttcacacttttccggcagttttgcagtccagcggactttattccctttcatcagtcgtgaccgtcccaagttcctctctgggaacccagacatacatctgcaacgtgaaccacaaaccctctaacactaaggttgataagaaggtggaacctaagagctgcgacaaaacccacacatgtcctccctgtcctgcccctgaactgctgggcgggccttccgtgttcctgtttcctcctaagcctaaggatacactgatgattagcaggacacccgaggtcacctgcgtcgtggtcgacgtctcccacgaggaccctgaagtgaaatttaattggtatgtcgatggagtcgaggtccacaatgccaagaccaaacctagagaggaacaatataattccacatatagagtcgtgtccgtcctcacagtcctccaccaagattggctcaatggcaaagagtataaatgcaaagtgagcaataaggctctgcccgctcccattgaaaaaacaatctccaaagctaagggccaacccagagaaccccaggtgtatacactgccccccagcagagaagagatgaccaaaaaccaggtcagcctgacatgtctcgtgaaaggattctatcctagcgacattgccgtggagtgggagtccaatggccagcctgagaataactataagaccaccccccctgtgctggactccgatggatccttcttcctctacagcaagctgacagtggataaaagcagatggcaacagggaaacgtgttcagctgtagcgtcatgcatgaagccctgcacaatcattatacccaaaaaagcctctccctgtctccaggaggtggtggaggaagcggaggtggcggtagtcaggtgcaactggtcgagtccggcggaggcgtcgtgcaacctggcaggagcctcagactctcctgtgctgctagcggcttcgcctttactaagtaccacatgtcatggttccgtcaggctccaggcaagggacgagagttagttagtcacatctccgcggggggaagaacatattatagtgactccgtagaggggcgattcaccatctcccgggacaatgccaaaaggatggtctacttacagatgaatagccttcgtgccgaagataccgccgtgtattactgtgttaaggagtcaaggccccacagttacggggaccactggggccaaggaaccctggttacagtcagcagctaatag

SEQ ID NO: 8573 - DNA, 1746 bp, synthetic construct
  source 1..1746: mol_type = other DNA
gaggtgcaactggtagagagcggcgggggcttagtccagcctgggggctccctccggctgtcttgttccgcaagcggattcactttttcatccttcggcatgcactgggtcagacaagctccgggcaaaggacttgaatgggtggcatatatcagctcagggagttccaccatttactacggggacaccgttaaaggcaggttcacgattagtagggataatgccaagaattccctcttcctgcaaatgtctagccttagagccgaggatactgccgtttactactgtgcgcgagaagggggctactactacggacgctcatactacactatggattattggggccaagggacgaccgtaactgtaagctctgcatcaacgaaaggccctagtgtgtttcctctcgcacccagcagtaaaagcacctcagggggtactgctgccctgggctgccttgtgaaagattatttcccggaacctgttactgtgtcttggaatagcggcgctctcacctctggtgttcacacttttccggcagttttgcagtccagcggactttattccctttcatcagtcgtgaccgtcccaagttcctctctgggaacccagacatacatctgcaacgtgaaccacaaaccctctaacactaaggttgataagaaggtggaacctaagagctgcgacaaaacccacacatgtcctccctgtcctgcccctgaactgctgggcgggccttccgtgttcctgtttcctcctaagcctaaggatacactgatgattagcaggacacccgaggtcacctgcgtcgtggtcgacgtctcccacgaggaccctgaagtgaaatttaattggtatgtcgatggagtcgaggtccacaatgccaagaccaaacctagagaggaacaatataattccacatatagagtcgtgtccgtcctcacagtcctccaccaagattggctcaatggcaaagagtataaatgcaaagtgagcaataaggctctgcccgctcccattgaaaaaacaatctccaaagctaagggccaacccagagaaccccaggtgtatacactgcccccctgcagagaagagatgaccaaaaaccaggtcagcctgtggtgtctcgtgaaaggattctatcctagcgacattgccgtggagtgggagtccaatggccagcctgagaataactataagaccaccccccctgtgctggactccgatggatccttcttcctctacagcaagctgacagtggataaaagcagatggcaacagggaaacgtgttcagctgtagcgtcatgcatgaagccctgcacaatcattatacccaaaaaagcctctccctgtctccaggaggtggtggaggaagcggaggtggcggtagtcaggtgcaactggtcgagtccggcggaggcgtcgtgcaacctggcaggagcctcagactctcctgtgctgctagcggcttttcttttagcaatttcggaatgagctgggtacgacaggcacgcggaaaaggattggagtgggtttcctcaactggatctgacggcactgcgtactatgctgactccgtgaaaggaaggttcactatttctagggataacgcgaagaatacactttatttgcagatgaactctctgcgagctgaggacaccgcggtgtactactgcgccagagccccaagtagacacgggttcgactactggggccaaggaaccctggttacagtcagcagctaatag

SEQ ID NO: 8574 - DNA, 1746 bp, synthetic construct
  source 1..1746: mol_type = other DNA
gaggtgcaactggtagagagcggcgggggcttagtccagcctgggggctccctccggctgtcttgttccgcaagcggattcactttttcatccttcggcatgcactgggtcagacaagctccgggcaaaggacttgaatgggtggcatatatcagctcagggagttccaccatttactacggggacaccgttaaaggcaggttcacgattagtagggataatgccaagaattccctcttcctgcaaatgtctagccttagagccgaggatactgccgtttactactgtgcgcgagaagggggctactactacggacgctcatactacactatggattattggggccaagggacgaccgtaactgtaagctctgcatcaacgaaaggccctagtgtgtttcctctcgcacccagcagtaaaagcacctcagggggtactgctgccctgggctgccttgtgaaagattatttcccggaacctgttactgtgtcttggaatagcggcgctctcacctctggtgttcacacttttccggcagttttgcagtccagcggactttattccctttcatcagtcgtgaccgtcccaagttcctctctgggaacccagacatacatctgcaacgtgaaccacaaaccctctaacactaaggttgataagaaggtggaacctaagagctgcgacaaaacccacacatgtcctccctgtcctgcccctgaactgctgggcgggccttccgtgttcctgtttcctcctaagcctaaggatacactgatgattagcaggacacccgaggtcacctgcgtcgtggtcgacgtctcccacgaggaccctgaagtgaaatttaattggtatgtcgatggagtcgaggtccacaatgccaagaccaaacctagagaggaacaatataattccacatatagagtcgtgtccgtcctcacagtcctccaccaagattggctcaatggcaaagagtataaatgcaaagtgagcaataaggctctgcccgctcccattgaaaaaacaatctccaaagctaagggccaacccagagaaccccaggtgtatacactgcccccctgcagagaagagatgaccaaaaaccaggtcagcctgtggtgtctcgtgaaaggattctatcctagcgacattgccgtggagtgggagtccaatggccagcctgagaataactataagaccaccccccctgtgctggactccgatggatccttcttcctctacagcaagctgacagtggataaaagcagatggcaacagggaaacgtgttcagctgtagcgtcatgcatgaagccctgcacaatcattatacccaaaaaagcctctccctgtctccaggaggtggtggaggaagcggaggtggcggtagtcaggtgcaactggtcgagtccggcggaggcgtcgtgcaacctggcaggagcctcagactctcctgtgctgctagcggcttcagcttcagcaatttcggcatgagctgggtgcgtcaggcccgagggaaaggcttggaatgggtcagttccatcgggagcgacggacgagcttactacgctgacagcgtgaagggtcggtttactatcagcagagataacgccaagaacactctgtacctgcaaatgaattctctgagggcagaggatactgccgtgtactattgtgccagggcgccttcaaggcacggatttgactactggggccaaggaaccctggttacagtcagcagctaatag

SEQ ID NO: 8575 - DNA, 1746 bp, synthetic construct
  source 1..1746: mol_type = other DNA
gaggtgcaactggtagagagcggcgggggcttagtccagcctgggggctccctccggctgtcttgttccgcaagcggattcactttttcatccttcggcatgcactgggtcagacaagctccgggcaaaggacttgaatgggtggcatatatcagctcagggagttccaccatttactacggggacaccgttaaaggcaggttcacgattagtagggataatgccaagaattccctcttcctgcaaatgtctagccttagagccgaggatactgccgtttactactgtgcgcgagaagggggctactactacggacgctcatactacactatggattattggggccaagggacgaccgtaactgtaagctctgcatcaacgaaaggccctagtgtgtttcctctcgcacccagcagtaaaagcacctcagggggtactgctgccctgggctgccttgtgaaagattatttcccggaacctgttactgtgtcttggaatagcggcgctctcacctctggtgttcacacttttccggcagttttgcagtccagcggactttattccctttcatcagtcgtgaccgtcccaagttcctctctgggaacccagacatacatctgcaacgtgaaccacaaaccctctaacactaaggttgataagaaggtggaacctaagagctgcgacaaaacccacacatgtcctccctgtcctgcccctgaactgctgggcgggccttccgtgttcctgtttcctcctaagcctaaggatacactgatgattagcaggacacccgaggtcacctgcgtcgtggtcgacgtctcccacgaggaccctgaagtgaaatttaattggtatgtcgatggagtcgaggtccacaatgccaagaccaaacctagagaggaacaatataattccacatatagagtcgtgtccgtcctcacagtcctccaccaagattggctcaatggcaaagagtataaatgcaaagtgagcaataaggctctgcccgctcccattgaaaaaacaatctccaaagctaagggccaacccagagaaccccaggtgtatacactgcccccctgcagagaagagatgaccaaaaaccaggtcagcctgtggtgtctcgtgaaaggattctatcctagcgacattgccgtggagtgggagtccaatggccagcctgagaataactataagaccaccccccctgtgctggactccgatggatccttcttcctctacagcaagctgacagtggataaaagcagatggcaacagggaaacgtgttcagctgtagcgtcatgcatgaagccctgcacaatcattatacccaaaaaagcctctccctgtctccaggaggtggtggaggaagcggaggtggcggtagtcaggtgcaactggtcgagtccggcggaggcgtcgtgcaacctggcaggagcctcagactctcctgtgctgctagcggcttcagcttcagcaatttcggcatgagctgggtgcgtcaggcccgagggaaaggcttggaatgggtcagttccgtagggagcgacggaaccgcttactacgctgacagcgtgaagggtcggtttactatcagcagagataacgccaagaacactctgtacctgcaaatgaattctctgagggcagaggatactgccgtgtactattgtgccagggcgccttcaaggcacggatttgactactggggccaaggaaccctggttacagtcagcagctaatag

SEQ ID NO: 8576 - DNA, 1746 bp, synthetic construct
  source 1..1746: mol_type = other DNA
gaggtgcaactggtagagagcggcgggggcttagtccagcctgggggctccctccggctgtcttgttccgcaagcggattcactttttcatccttcggcatgcactgggtcagacaagctccgggcaaaggacttgaatgggtggcatatatcagctcagggagttccaccatttactacggggacaccgttaaaggcaggttcacgattagtagggataatgccaagaattccctcttcctgcaaatgtctagccttagagccgaggatactgccgtttactactgtgcgcgagaagggggctactactacggacgctcatactacactatggattattggggccaagggacgaccgtaactgtaagctctgcatcaacgaaaggccctagtgtgtttcctctcgcacccagcagtaaaagcacctcagggggtactgctgccctgggctgccttgtgaaagattatttcccggaacctgttactgtgtcttggaatagcggcgctctcacctctggtgttcacacttttccggcagttttgcagtccagcggactttattccctttcatcagtcgtgaccgtcccaagttcctctctgggaacccagacatacatctgcaacgtgaaccacaaaccctctaacactaaggttgataagaaggtggaacctaagagctgcgacaaaacccacacatgtcctccctgtcctgcccctgaactgctgggcgggccttccgtgttcctgtttcctcctaagcctaaggatacactgatgattagcaggacacccgaggtcacctgcgtcgtggtcgacgtctcccacgaggaccctgaagtgaaatttaattggtatgtcgatggagtcgaggtccacaatgccaagaccaaacctagagaggaacaatataattccacatatagagtcgtgtccgtcctcacagtcctccaccaagattggctcaatggcaaagagtataaatgcaaagtgagcaataaggctctgcccgctcccattgaaaaaacaatctccaaagctaagggccaacccagagaaccccaggtgtatacactgcccccctgcagagaagagatgaccaaaaaccaggtcagcctgtggtgtctcgtgaaaggattctatcctagcgacattgccgtggagtgggagtccaatggccagcctgagaataactataagaccaccccccctgtgctggactccgatggatccttcttcctctacagcaagctgacagtggataaaagcagatggcaacagggaaacgtgttcagctgtagcgtcatgcatgaagccctgcacaatcattatacccaaaaaagcctctccctgtctccaggaggtggtggaggaagcggaggtggcggtagtcaggtgcaactggtcgagtccggcggaggcgtcgtgcaacctggcaggagcctcagactctcctgtgctgctagcggcttcagcttcagcaatttcggcatgagctgggtgcgtcaggcccccgggaaaggcttggaatgggtcagttccaccgggagcgacggaaccgcttactacgctgacagcgtgaagggtcggtttactatcagcagagataacgccaagaacactctgcacctgcaaatgaattctctgagggcagaggatactgccgtgtactattgtgccagggcgccttcaaggcacggatttgactactggggccaaggaaccctggttacagtcagcagctaatag

SEQ ID NO: 8577 - DNA, 1743 bp, synthetic construct
  source 1..1743: mol_type = other DNA
gaggtgcaactggtagagagcggcgggggcttagtccagcctgggggctccctccggctgtcttgttccgcaagcggattcactttttcatccttcggcatgcactgggtcagacaagctccgggcaaaggacttgaatgggtggcatatatcagctcagggagttccaccatttactacggggacaccgttaaaggcaggttcacgattagtagggataatgccaagaattccctcttcctgcaaatgtctagccttagagccgaggatactgccgtttactactgtgcgcgagaagggggctactactacggacgctcatactacactatggattattggggccaagggacgaccgtaactgtaagctctgcatcaacgaaaggccctagtgtgtttcctctcgcacccagcagtaaaagcacctcagggggtactgctgccctgggctgccttgtgaaagattatttcccggaacctgttactgtgtcttggaatagcggcgctctcacctctggtgttcacacttttccggcagttttgcagtccagcggactttattccctttcatcagtcgtgaccgtcccaagttcctctctgggaacccagacatacatctgcaacgtgaaccacaaaccctctaacactaaggttgataagaaggtggaacctaagagctgcgacaaaacccacacatgtcctccctgtcctgcccctgaactgctgggcgggccttccgtgttcctgtttcctcctaagcctaaggatacactgatgattagcaggacacccgaggtcacctgcgtcgtggtcgacgtctcccacgaggaccctgaagtgaaatttaattggtatgtcgatggagtcgaggtccacaatgccaagaccaaacctagagaggaacaatataattccacatatagagtcgtgtccgtcctcacagtcctccaccaagattggctcaatggcaaagagtataaatgcaaagtgagcaataaggctctgcccgctcccattgaaaaaacaatctccaaagctaagggccaacccagagaaccccaggtgtatacactgcccccctgcagagaagagatgaccaaaaaccaggtcagcctgtggtgtctcgtgaaaggattctatcctagcgacattgccgtggagtgggagtccaatggccagcctgagaataactataagaccaccccccctgtgctggactccgatggatccttcttcctctacagcaagctgacagtggataaaagcagatggcaacagggaaacgtgttcagctgtagcgtcatgcatgaagccctgcacaatcattatacccaaaaaagcctctccctgtctccaggaggtggtggaggaagcggaggtggcggtagtcaggtgcaactggtcgagtccggcggaggcgtcgtgcaacctggcaggagcctcagactctcctgtgctgctagcggcttcgctgtcgatgctagcgatatgggctggttccgccaagccccaggcaaaggacgagaactggtctcatctatctccagcgataacgacacctattacgcagacagcgtggagggacgcttcaccattagtcgtgacaatgctaagcggatggtctacctgcagatgaattcactgagggctgaagatacagctgtgtactactgcgctagcggtagatttctggagcctgattactggggccaaggaaccctggttacagtcagcagctaatag

SEQ ID NO: 8578 - DNA, 1746 bp, synthetic construct
  source 1..1746: mol_type = other DNA
gaggtgcaactggtagagagcggcgggggcttagtccagcctgggggctccctccggctgtcttgttccgcaagcggattcactttttcatccttcggcatgcactgggtcagacaagctccgggcaaaggacttgaatgggtggcatatatcagctcagggagttccaccatttactacggggacaccgttaaaggcaggttcacgattagtagggataatgccaagaattccctcttcctgcaaatgtctagccttagagccgaggatactgccgtttactactgtgcgcgagaagggggctactactacggacgctcatactacactatggattattggggccaagggacgaccgtaactgtaagctctgcatcaacgaaaggccctagtgtgtttcctctcgcacccagcagtaaaagcacctcagggggtactgctgccctgggctgccttgtgaaagattatttcccggaacctgttactgtgtcttggaatagcggcgctctcacctctggtgttcacacttttccggcagttttgcagtccagcggactttattccctttcatcagtcgtgaccgtcccaagttcctctctgggaacccagacatacatctgcaacgtgaaccacaaaccctctaacactaaggttgataagaaggtggaacctaagagctgcgacaaaacccacacatgtcctccctgtcctgcccctgaactgctgggcgggccttccgtgttcctgtttcctcctaagcctaaggatacactgatgattagcaggacacccgaggtcacctgcgtcgtggtcgacgtctcccacgaggaccctgaagtgaaatttaattggtatgtcgatggagtcgaggtccacaatgccaagaccaaacctagagaggaacaatataattccacatatagagtcgtgtccgtcctcacagtcctccaccaagattggctcaatggcaaagagtataaatgcaaagtgagcaataaggctctgcccgctcccattgaaaaaacaatctccaaagctaagggccaacccagagaaccccaggtgtatacactgcccccctgcagagaagagatgaccaaaaaccaggtcagcctgtggtgtctcgtgaaaggattctatcctagcgacattgccgtggagtgggagtccaatggccagcctgagaataactataagaccaccccccctgtgctggactccgatggatccttcttcctctacagcaagctgacagtggataaaagcagatggcaacagggaaacgtgttcagctgtagcgtcatgcatgaagccctgcacaatcattatacccaaaaaagcctctccctgtctccaggaggtggtggaggaagcggaggtggcggtagtcaggtgcaactggtcgagtccggcggaggcgtcgtgcaacctggcaggagcctcagactctcctgtgctgctagcggcttcacctttgacgactcagacatgggttggtttaggcaggctcctggtaaaggccgggagctggtcgctgctatcaacacaggaggaggaaagacctactatgctgcaacagtcgaaggacggtttacaatatccagggataacgccaagcgcatggtgtatttgcagatgaactcccttagagctgaggacaccgcagtatactattgcgcctcagggcgatttttagaacccgactactggggccaaggaaccctggttacagtcagcagctaatag

SEQ ID NO: 8579 - DNA, 1749 bp, synthetic construct
  source 1..1749: mol_type = other DNA
gaggtgcaactggtagagagcggcgggggcttagtccagcctgggggctccctccggctgtcttgttccgcaagcggattcactttttcatccttcggcatgcactgggtcagacaagctccgggcaaaggacttgaatgggtggcatatatcagctcagggagttccaccatttactacggggacaccgttaaaggcaggttcacgattagtagggataatgccaagaattccctcttcctgcaaatgtctagccttagagccgaggatactgccgtttactactgtgcgcgagaagggggctactactacggacgctcatactacactatggattattggggccaagggacgaccgtaactgtaagctctgcatcaacgaaaggccctagtgtgtttcctctcgcacccagcagtaaaagcacctcagggggtactgctgccctgggctgccttgtgaaagattatttcccggaacctgttactgtgtcttggaatagcggcgctctcacctctggtgttcacacttttccggcagttttgcagtccagcggactttattccctttcatcagtcgtgaccgtcccaagttcctctctgggaacccagacatacatctgcaacgtgaaccacaaaccctctaacactaaggttgataagaaggtggaacctaagagctgcgacaaaacccacacatgtcctccctgtcctgcccctgaactgctgggcgggccttccgtgttcctgtttcctcctaagcctaaggatacactgatgattagcaggacacccgaggtcacctgcgtcgtggtcgacgtctcccacgaggaccctgaagtgaaatttaattggtatgtcgatggagtcgaggtccacaatgccaagaccaaacctagagaggaacaatataattccacatatagagtcgtgtccgtcctcacagtcctccaccaagattggctcaatggcaaagagtataaatgcaaagtgagcaataaggctctgcccgctcccattgaaaaaacaatctccaaagctaagggccaacccagagaaccccaggtgtatacactgcccccctgcagagaagagatgaccaaaaaccaggtcagcctgtggtgtctcgtgaaaggattctatcctagcgacattgccgtggagtgggagtccaatggccagcctgagaataactataagaccaccccccctgtgctggactccgatggatccttcttcctctacagcaagctgacagtggataaaagcagatggcaacagggaaacgtgttcagctgtagcgtcatgcatgaagccctgcacaatcattatacccaaaaaagcctctccctgtctccaggaggtggtggaggaagcggaggtggcggtagtcaggtgcaactggtcgagtccggcggaggcgtcgtgcaacctggcaggagcctcagactctcctgtgctgctagcggcctgacattcgatgatagcgatatggggtggtttcgccaggctcctggtaaagagcgtgaaagagtatccactatatctagtgacggtaccccacactatgatgactcagtcaaaggccgctttaccattagcagagacaatagcaaaaatactctgtaccttcagatgaattcacttcgagcggaagacactgccgtgtactactgtgcaagacgcgatggtggcagctggaatttcgactattggggccaaggaaccctggttacagtcagcagctaatag

SEQ ID NO: 8580 - DNA, 1746 bp, synthetic construct
  source 1..1746: mol_type = other DNA
gaggtgcaactggtagagagcggcgggggcttagtccagcctgggggctccctccggctgtcttgttccgcaagcggattcactttttcatccttcggcatgcactgggtcagacaagctccgggcaaaggacttgaatgggtggcatatatcagctcagggagttccaccatttactacggggacaccgttaaaggcaggttcacgattagtagggataatgccaagaattccctcttcctgcaaatgtctagccttagagccgaggatactgccgtttactactgtgcgcgagaagggggctactactacggacgctcatactacactatggattattggggccaagggacgaccgtaactgtaagctctgcatcaacgaaaggccctagtgtgtttcctctcgcacccagcagtaaaagcacctcagggggtactgctgccctgggctgccttgtgaaagattatttcccggaacctgttactgtgtcttggaatagcggcgctctcacctctggtgttcacacttttccggcagttttgcagtccagcggactttattccctttcatcagtcgtgaccgtcccaagttcctctctgggaacccagacatacatctgcaacgtgaaccacaaaccctctaacactaaggttgataagaaggtggaacctaagagctgcgacaaaacccacacatgtcctccctgtcctgcccctgaactgctgggcgggccttccgtgttcctgtttcctcctaagcctaaggatacactgatgattagcaggacacccgaggtcacctgcgtcgtggtcgacgtctcccacgaggaccctgaagtgaaatttaattggtatgtcgatggagtcgaggtccacaatgccaagaccaaacctagagaggaacaatataattccacatatagagtcgtgtccgtcctcacagtcctccaccaagattggctcaatggcaaagagtataaatgcaaagtgagcaataaggctctgcccgctcccattgaaaaaacaatctccaaagctaagggccaacccagagaaccccaggtgtatacactgcccccctgcagagaagagatgaccaaaaaccaggtcagcctgtggtgtctcgtgaaaggattctatcctagcgacattgccgtggagtgggagtccaatggccagcctgagaataactataagaccaccccccctgtgctggactccgatggatccttcttcctctacagcaagctgacagtggataaaagcagatggcaacagggaaacgtgttcagctgtagcgtcatgcatgaagccctgcacaatcattatacccaaaaaagcctctccctgtctccaggaggtggtggaggaagcggaggtggcggtagtcaggtgcaactggtcgagtccggcggaggcgtcgtgcaacctggcaggagcctcagactctcctgtgctgctagcggctttaccttcgatggatccgacattgcatgggtcaggagagccccaggaaaaggagaggagtgggtgagtaccatcagttcagacggcactgtgtactacagtgaccctgtgaagggaagatttacaatctctgctgatacatcaaagaacactgcatatctgcaaatgaacagtcttagggcagaagacaccgcagtgtactactgtgccatcagctcttggtacggcgacttcgactactggggccaaggaaccctggttacagtcagcagctaatag

SEQ ID NO: 8581 - DNA, 1758 bp, synthetic construct
  source 1..1758: mol_type = other DNA
gaggtgcaactggtagagagcggcgggggcttagtccagcctgggggctccctccggctgtcttgttccgcaagcggattcactttttcatccttcggcatgcactgggtcagacaagctccgggcaaaggacttgaatgggtggcatatatcagctcagggagttccaccatttactacggggacaccgttaaaggcaggttcacgattagtagggataatgccaagaattccctcttcctgcaaatgtctagccttagagccgaggatactgccgtttactactgtgcgcgagaagggggctactactacggacgctcatactacactatggattattggggccaagggacgaccgtaactgtaagctctgcatcaacgaaaggccctagtgtgtttcctctcgcacccagcagtaaaagcacctcagggggtactgctgccctgggctgccttgtgaaagattatttcccggaacctgttactgtgtcttggaatagcggcgctctcacctctggtgttcacacttttccggcagttttgcagtccagcggactttattccctttcatcagtcgtgaccgtcccaagttcctctctgggaacccagacatacatctgcaacgtgaaccacaaaccctctaacactaaggttgataagaaggtggaacctaagagctgcgacaaaacccacacatgtcctccctgtcctgcccctgaactgctgggcgggccttccgtgttcctgtttcctcctaagcctaaggatacactgatgattagcaggacacccgaggtcacctgcgtcgtggtcgacgtctcccacgaggaccctgaagtgaaatttaattggtatgtcgatggagtcgaggtccacaatgccaagaccaaacctagagaggaacaatataattccacatatagagtcgtgtccgtcctcacagtcctccaccaagattggctcaatggcaaagagtataaatgcaaagtgagcaataaggctctgcccgctcccattgaaaaaacaatctccaaagctaagggccaacccagagaaccccaggtgtatacactgcccccctgcagagaagagatgaccaaaaaccaggtcagcctgtggtgtctcgtgaaaggattctatcctagcgacattgccgtggagtgggagtccaatggccagcctgagaataactataagaccaccccccctgtgctggactccgatggatccttcttcctctacagcaagctgacagtggataaaagcagatggcaacagggaaacgtgttcagctgtagcgtcatgcatgaagccctgcacaatcattatacccaaaaaagcctctccctgtctccaggaggtggtggaggaagcggaggtggcggtagtcaggtgcaactggtcgagtccggcggaggcgtcgtgcaacctggcaggagcctcagactctcctgtgctgctagcggccatattctgaattattggtatatgggttgggtaagacgtgctcccggaaaaggagaagagtgggtcgctggcatatccccgggggggaccgtcacggtctatgccgactcagtgaagggaaggttcactataagcagagataattccaagaacactctgtacctccagatgaactcactgagggcagaggatacggctgtgtactactgtgctagaggcggccagggtggtgacgcttgggccttcgactattggggccaaggaaccctggttacagtcagcagctaatag

SEQ ID NO: 8582 - DNA, 1755 bp, synthetic construct
  source 1..1755: mol_type = other DNA
gaggtgcaactggtagagagcggcgggggcttagtccagcctgggggctccctccggctgtcttgttccgcaagcggattcactttttcatccttcggcatgcactgggtcagacaagctccgggcaaaggacttgaatgggtggcatatatcagctcagggagttccaccatttactacggggacaccgttaaaggcaggttcacgattagtagggataatgccaagaattccctcttcctgcaaatgtctagccttagagccgaggatactgccgtttactactgtgcgcgagaagggggctactactacggacgctcatactacactatggattattggggccaagggacgaccgtaactgtaagctctgcatcaacgaaaggccctagtgtgtttcctctcgcacccagcagtaaaagcacctcagggggtactgctgccctgggctgccttgtgaaagattatttcccggaacctgttactgtgtcttggaatagcggcgctctcacctctggtgttcacacttttccggcagttttgcagtccagcggactttattccctttcatcagtcgtgaccgtcccaagttcctctctgggaacccagacatacatctgcaacgtgaaccacaaaccctctaacactaaggttgataagaaggtggaacctaagagctgcgacaaaacccacacatgtcctccctgtcctgcccctgaactgctgggcgggccttccgtgttcctgtttcctcctaagcctaaggatacactgatgattagcaggacacccgaggtcacctgcgtcgtggtcgacgtctcccacgaggaccctgaagtgaaatttaattggtatgtcgatggagtcgaggtccacaatgccaagaccaaacctagagaggaacaatataattccacatatagagtcgtgtccgtcctcacagtcctccaccaagattggctcaatggcaaagagtataaatgcaaagtgagcaataaggctctgcccgctcccattgaaaaaacaatctccaaagctaagggccaacccagagaaccccaggtgtatacactgcccccctgcagagaagagatgaccaaaaaccaggtcagcctgtggtgtctcgtgaaaggattctatcctagcgacattgccgtggagtgggagtccaatggccagcctgagaataactataagaccaccccccctgtgctggactccgatggatccttcttcctctacagcaagctgacagtggataaaagcagatggcaacagggaaacgtgttcagctgtagcgtcatgcatgaagccctgcacaatcattatacccaaaaaagcctctccctgtctccaggaggtggtggaggaagcggaggtggcggtagtcaggtgcaactggtcgagtccggcggaggcgtcgtgcaacctggcaggagcctcagactctcctgtgctgctagcggcttcggcgtggcctcaagcgacatgggttggttcaggcaggcccctggaaagggaagggagctggtggccagtattaatactgacgggtcaacgatctacgcggagtctgtggagggcaggttcaccatctcaagagacaacgccaagaggatggtctacctccagatgaactctttgcgggccgaagatactgctgtgtattactgcgccgcatacgataccagcgcataccactctcctttcgactactggggccaaggaaccctggttacagtcagcagctaatag

SEQ ID NO: 8583 - DNA, 1752 bp, synthetic construct
  source 1..1752: mol_type = other DNA
gaggtgcaactggtagagagcggcgggggcttagtccagcctgggggctccctccggctgtcttgttccgcaagcggattcactttttcatccttcggcatgcactgggtcagacaagctccgggcaaaggacttgaatgggtggcatatatcagctcagggagttccaccatttactacggggacaccgttaaaggcaggttcacgattagtagggataatgccaagaattccctcttcctgcaaatgtctagccttagagccgaggatactgccgtttactactgtgcgcgagaagggggctactactacggacgctcatactacactatggattattggggccaagggacgaccgtaactgtaagctctgcatcaacgaaaggccctagtgtgtttcctctcgcacccagcagtaaaagcacctcagggggtactgctgccctgggctgccttgtgaaagattatttcccggaacctgttactgtgtcttggaatagcggcgctctcacctctggtgttcacacttttccggcagttttgcagtccagcggactttattccctttcatcagtcgtgaccgtcccaagttcctctctgggaacccagacatacatctgcaacgtgaaccacaaaccctctaacactaaggttgataagaaggtggaacctaagagctgcgacaaaacccacacatgtcctccctgtcctgcccctgaactgctgggcgggccttccgtgttcctgtttcctcctaagcctaaggatacactgatgattagcaggacacccgaggtcacctgcgtcgtggtcgacgtctcccacgaggaccctgaagtgaaatttaattggtatgtcgatggagtcgaggtccacaatgccaagaccaaacctagagaggaacaatataattccacatatagagtcgtgtccgtcctcacagtcctccaccaagattggctcaatggcaaagagtataaatgcaaagtgagcaataaggctctgcccgctcccattgaaaaaacaatctccaaagctaagggccaacccagagaaccccaggtgtatacactgcccccctgcagagaagagatgaccaaaaaccaggtcagcctgtggtgtctcgtgaaaggattctatcctagcgacattgccgtggagtgggagtccaatggccagcctgagaataactataagaccaccccccctgtgctggactccgatggatccttcttcctctacagcaagctgacagtggataaaagcagatggcaacagggaaacgtgttcagctgtagcgtcatgcatgaagccctgcacaatcattatacccaaaaaagcctctccctgtctccaggaggtggtggaggaagcggaggtggcggtagtcaggtgcaactggtcgagtccggcggaggcgtcgtgcaacctggcaggagcctcagactctcctgtgctgctagcggctacaccttccgctcagccagtatggggtgggttcggagggcccctggcaagggtgaggagtgggtggccgtgatagacagtgagggacatactatctacgctgactctgtaaaagggcggtttactataagcgccgatacctcaaaaaatactgcatatctccagatgaactccctcagagccgaggatactgccgtgtattattgtgcgaaggatatttatggtgactatggcggtcccgactattggggccaaggaaccctggttacagtcagcagctaatag

SEQ ID NO: 8584 - DNA, 1752 bp, synthetic construct
  source 1..1752: mol_type = other DNA
gaggtgcaactggtagagagcggcgggggcttagtccagcctgggggctccctccggctgtcttgttccgcaagcggattcactttttcatccttcggcatgcactgggtcagacaagctccgggcaaaggacttgaatgggtggcatatatcagctcagggagttccaccatttactacggggacaccgttaaaggcaggttcacgattagtagggataatgccaagaattccctcttcctgcaaatgtctagccttagagccgaggatactgccgtttactactgtgcgcgagaagggggctactactacggacgctcatactacactatggattattggggccaagggacgaccgtaactgtaagctctgcatcaacgaaaggccctagtgtgtttcctctcgcacccagcagtaaaagcacctcagggggtactgctgccctgggctgccttgtgaaagattatttcccggaacctgttactgtgtcttggaatagcggcgctctcacctctggtgttcacacttttccggcagttttgcagtccagcggactttattccctttcatcagtcgtgaccgtcccaagttcctctctgggaacccagacatacatctgcaacgtgaaccacaaaccctctaacactaaggttgataagaaggtggaacctaagagctgcgacaaaacccacacatgtcctccctgtcctgcccctgaactgctgggcgggccttccgtgttcctgtttcctcctaagcctaaggatacactgatgattagcaggacacccgaggtcacctgcgtcgtggtcgacgtctcccacgaggaccctgaagtgaaatttaattggtatgtcgatggagtcgaggtccacaatgccaagaccaaacctagagaggaacaatataattccacatatagagtcgtgtccgtcctcacagtcctccaccaagattggctcaatggcaaagagtataaatgcaaagtgagcaataaggctctgcccgctcccattgaaaaaacaatctccaaagctaagggccaacccagagaaccccaggtgtatacactgcccccctgcagagaagagatgaccaaaaaccaggtcagcctgtggtgtctcgtgaaaggattctatcctagcgacattgccgtggagtgggagtccaatggccagcctgagaataactataagaccaccccccctgtgctggactccgatggatccttcttcctctacagcaagctgacagtggataaaagcagatggcaacagggaaacgtgttcagctgtagcgtcatgcatgaagccctgcacaatcattatacccaaaaaagcctctccctgtctccaggaggtggtggaggaagcggaggtggcggtagtcaggtgcaactggtcgagtccggcggaggcgtcgtgcaacctggcaggagcctcagactctcctgtgctgctagcggcacccgacgtcctaactacgttacatggttcagacaagctccactgaacgagcgacaagtcgtcgccggcattgacagcgccggcaccactacgtacgccgattctgtcaagggcaggttcactatcagccaggataacgcgaaaaacactgtatatctgcagatgaacagtctgcgtgcggaggatacagccgtttactactgtgcttcaggaatttcttcctcatccttctatccattcgactcttggggccaaggaaccctggttacagtcagcagctaatag

SEQ ID NO: 8585 - DNA, 1749 bp, synthetic construct
  source 1..1749: mol_type = other DNA
gaggtgcaactggtagagagcggcgggggcttagtccagcctgggggctccctccggctgtcttgttccgcaagcggattcactttttcatccttcggcatgcactgggtcagacaagctccgggcaaaggacttgaatgggtggcatatatcagctcagggagttccaccatttactacggggacaccgttaaaggcaggttcacgattagtagggataatgccaagaattccctcttcctgcaaatgtctagccttagagccgaggatactgccgtttactactgtgcgcgagaagggggctactactacggacgctcatactacactatggattattggggccaagggacgaccgtaactgtaagctctgcatcaacgaaaggccctagtgtgtttcctctcgcacccagcagtaaaagcacctcagggggtactgctgccctgggctgccttgtgaaagattatttcccggaacctgttactgtgtcttggaatagcggcgctctcacctctggtgttcacacttttccggcagttttgcagtccagcggactttattccctttcatcagtcgtgaccgtcccaagttcctctctgggaacccagacatacatctgcaacgtgaaccacaaaccctctaacactaaggttgataagaaggtggaacctaagagctgcgacaaaacccacacatgtcctccctgtcctgcccctgaactgctgggcgggccttccgtgttcctgtttcctcctaagcctaaggatacactgatgattagcaggacacccgaggtcacctgcgtcgtggtcgacgtctcccacgaggaccctgaagtgaaatttaattggtatgtcgatggagtcgaggtccacaatgccaagaccaaacctagagaggaacaatataattccacatatagagtcgtgtccgtcctcacagtcctccaccaagattggctcaatggcaaagagtataaatgcaaagtgagcaataaggctctgcccgctcccattgaaaaaacaatctccaaagctaagggccaacccagagaaccccaggtgtatacactgcccccctgcagagaagagatgaccaaaaaccaggtcagcctgtggtgtctcgtgaaaggattctatcctagcgacattgccgtggagtgggagtccaatggccagcctgagaataactataagaccaccccccctgtgctggactccgatggatccttcttcctctacagcaagctgacagtggataaaagcagatggcaacagggaaacgtgttcagctgtagcgtcatgcatgaagccctgcacaatcattatacccaaaaaagcctctccctgtctccaggaggtggtggaggaagcggaggtggcggtagtcaggtgcaactggtcgagtccggcggaggcgtcgtgcaacctggcaggagcctcagactctcctgtgctgctagcggctttaactttgacgacagtgacatggggtggtttcgccaagcgccagggaaaggtagagagttggtctcctcaatcgcatctgacggggcgacatattacgcggactccgtggagggccggtttaccatctcccgggataatgcaaagaggatggtgtacctgcaaatgaattccctccgagctgaagatacagctgtctactactgtgctcgagatagtccgtcattgcgagcctttgactcctggggccaaggaaccctggttacagtcagcagctaatag

SEQ ID NO: 8586 - DNA, 1752 bp, synthetic construct
  source 1..1752: mol_type = other DNA
gaggtgcaactggtagagagcggcgggggcttagtccagcctgggggctccctccggctgtcttgttccgcaagcggattcactttttcatccttcggcatgcactgggtcagacaagctccgggcaaaggacttgaatgggtggcatatatcagctcagggagttccaccatttactacggggacaccgttaaaggcaggttcacgattagtagggataatgccaagaattccctcttcctgcaaatgtctagccttagagccgaggatactgccgtttactactgtgcgcgagaagggggctactactacggacgctcatactacactatggattattggggccaagggacgaccgtaactgtaagctctgcatcaacgaaaggccctagtgtgtttcctctcgcacccagcagtaaaagcacctcagggggtactgctgccctgggctgccttgtgaaagattatttcccggaacctgttactgtgtcttggaatagcggcgctctcacctctggtgttcacacttttccggcagttttgcagtccagcggactttattccctttcatcagtcgtgaccgtcccaagttcctctctgggaacccagacatacatctgcaacgtgaaccacaaaccctctaacactaaggttgataagaaggtggaacctaagagctgcgacaaaacccacacatgtcctccctgtcctgcccctgaactgctgggcgggccttccgtgttcctgtttcctcctaagcctaaggatacactgatgattagcaggacacccgaggtcacctgcgtcgtggtcgacgtctcccacgaggaccctgaagtgaaatttaattggtatgtcgatggagtcgaggtccacaatgccaagaccaaacctagagaggaacaatataattccacatatagagtcgtgtccgtcctcacagtcctccaccaagattggctcaatggcaaagagtataaatgcaaagtgagcaataaggctctgcccgctcccattgaaaaaacaatctccaaagctaagggccaacccagagaaccccaggtgtatacactgcccccctgcagagaagagatgaccaaaaaccaggtcagcctgtggtgtctcgtgaaaggattctatcctagcgacattgccgtggagtgggagtccaatggccagcctgagaataactataagaccaccccccctgtgctggactccgatggatccttcttcctctacagcaagctgacagtggataaaagcagatggcaacagggaaacgtgttcagctgtagcgtcatgcatgaagccctgcacaatcattatacccaaaaaagcctctccctgtctccaggaggtggtggaggaagcggaggtggcggtagtcaggtgcaactggtcgagtccggcggaggcgtcgtgcaacctggcaggagcctcagactctcctgtgctgctagcggcaccacctattctcgccaatactgtatgggatgggcgaggcaggccccaggtaagggcctggaatgggtcagctgtattgacgacgatgggaatacctattacgccgatagcgttaagggtagatttactatcagcagagataatagtaagaacacactctatctccagatgaattctctgcgcgccgaagatactgcagtgtactactgtgctagagaccctggcctcagcggagactttgattattggggccaaggaaccctggttacagtcagcagctaatag

SEQ ID NO: 8587 - DNA, 1755 bp, synthetic construct
  source 1..1755: mol_type = other DNA
gaggtgcaactggtagagagcggcgggggcttagtccagcctgggggctccctccggctgtcttgttccgcaagcggattcactttttcatccttcggcatgcactgggtcagacaagctccgggcaaaggacttgaatgggtggcatatatcagctcagggagttccaccatttactacggggacaccgttaaaggcaggttcacgattagtagggataatgccaagaattccctcttcctgcaaatgtctagccttagagccgaggatactgccgtttactactgtgcgcgagaagggggctactactacggacgctcatactacactatggattattggggccaagggacgaccgtaactgtaagctctgcatcaacgaaaggccctagtgtgtttcctctcgcacccagcagtaaaagcacctcagggggtactgctgccctgggctgccttgtgaaagattatttcccggaacctgttactgtgtcttggaatagcggcgctctcacctctggtgttcacacttttccggcagttttgcagtccagcggactttattccctttcatcagtcgtgaccgtcccaagttcctctctgggaacccagacatacatctgcaacgtgaaccacaaaccctctaacactaaggttgataagaaggtggaacctaagagctgcgacaaaacccacacatgtcctccctgtcctgcccctgaactgctgggcgggccttccgtgttcctgtttcctcctaagcctaaggatacactgatgattagcaggacacccgaggtcacctgcgtcgtggtcgacgtctcccacgaggaccctgaagtgaaatttaattggtatgtcgatggagtcgaggtccacaatgccaagaccaaacctagagaggaacaatataattccacatatagagtcgtgtccgtcctcacagtcctccaccaagattggctcaatggcaaagagtataaatgcaaagtgagcaataaggctctgcccgctcccattgaaaaaacaatctccaaagctaagggccaacccagagaaccccaggtgtatacactgcccccctgcagagaagagatgaccaaaaaccaggtcagcctgtggtgtctcgtgaaaggattctatcctagcgacattgccgtggagtgggagtccaatggccagcctgagaataactataagaccaccccccctgtgctggactccgatggatccttcttcctctacagcaagctgacagtggataaaagcagatggcaacagggaaacgtgttcagctgtagcgtcatgcatgaagccctgcacaatcattatacccaaaaaagcctctccctgtctccaggaggtggtggaggaagcggaggtggcggtagtcaggtgcaactggtcgagtccggcggaggcgtcgtgcaacctggcaggagcctcagactctcctgtgctgctagcggcattacctaccgggggccatgcatggggtggtatcgccaggcgcccgggaaagggcttgagtgggttgcgactctcgactctgacgggagcaccacttatgcggattctgtgaaaggacggtttacgatctctagggataacagcaaaaatacactgtatctgcagatgaatagcctccgcgcagaggatactgcggtgtattactgcgcaatgtatatgacaggcggagggggtgtagcatttgattactggggccaaggaaccctggttacagtcagcagctaatag

SEQ ID NO: 8588 - DNA, 1752 bp, synthetic construct
  source 1..1752: mol_type = other DNA
gaggtgcaactggtagagagcggcgggggcttagtccagcctgggggctccctccggctgtcttgttccgcaagcggattcactttttcatccttcggcatgcactgggtcagacaagctccgggcaaaggacttgaatgggtggcatatatcagctcagggagttccaccatttactacggggacaccgttaaaggcaggttcacgattagtagggataatgccaagaattccctcttcctgcaaatgtctagccttagagccgaggatactgccgtttactactgtgcgcgagaagggggctactactacggacgctcatactacactatggattattggggccaagggacgaccgtaactgtaagctctgcatcaacgaaaggccctagtgtgtttcctctcgcacccagcagtaaaagcacctcagggggtactgctgccctgggctgccttgtgaaagattatttcccggaacctgttactgtgtcttggaatagcggcgctctcacctctggtgttcacacttttccggcagttttgcagtccagcggactttattccctttcatcagtcgtgaccgtcccaagttcctctctgggaacccagacatacatctgcaacgtgaaccacaaaccctctaacactaaggttgataagaaggtggaacctaagagctgcgacaaaacccacacatgtcctccctgtcctgcccctgaactgctgggcgggccttccgtgttcctgtttcctcctaagcctaaggatacactgatgattagcaggacacccgaggtcacctgcgtcgtggtcgacgtctcccacgaggaccctgaagtgaaatttaattggtatgtcgatggagtcgaggtccacaatgccaagaccaaacctagagaggaacaatataattccacatatagagtcgtgtccgtcctcacagtcctccaccaagattggctcaatggcaaagagtataaatgcaaagtgagcaataaggctctgcccgctcccattgaaaaaacaatctccaaagctaagggccaacccagagaaccccaggtgtatacactgcccccctgcagagaagagatgaccaaaaaccaggtcagcctgtggtgtctcgtgaaaggattctatcctagcgacattgccgtggagtgggagtccaatggccagcctgagaataactataagaccaccccccctgtgctggactccgatggatccttcttcctctacagcaagctgacagtggataaaagcagatggcaacagggaaacgtgttcagctgtagcgtcatgcatgaagccctgcacaatcattatacccaaaaaagcctctccctgtctccaggaggtggtggaggaagcggaggtggcggtagtcaggtgcaactggtcgagtccggcggaggcgtcgtgcaacctggcaggagcctcagactctcctgtgctgctagcggctttaccttctccaaatacgctatgaactgggccagacaagcgccgggcaagggcctcgagtgggtagcgtttatcgatacggccggcaggaccatctatgccgattcagtgaaaggcagatttaccatttcccgggataactcaaagaataccttgtaccttcaaatgaattctctgagagctgaagataccgccgtctattattgcgcccctagctacggcgattccggagattacttcgactattggggccaaggaaccctggttacagtcagcagctaatag

SEQ ID NO: 8589 - DNA, 1758 bp, synthetic construct
  source 1..1758: mol_type = other DNA
gaggtgcaactggtagagagcggcgggggcttagtccagcctgggggctccctccggctgtcttgttccgcaagcggattcactttttcatccttcggcatgcactgggtcagacaagctccgggcaaaggacttgaatgggtggcatatatcagctcagggagttccaccatttactacggggacaccgttaaaggcaggttcacgattagtagggataatgccaagaattccctcttcctgcaaatgtctagccttagagccgaggatactgccgtttactactgtgcgcgagaagggggctactactacggacgctcatactacactatggattattggggccaagggacgaccgtaactgtaagctctgcatcaacgaaaggccctagtgtgtttcctctcgcacccagcagtaaaagcacctcagggggtactgctgccctgggctgccttgtgaaagattatttcccggaacctgttactgtgtcttggaatagcggcgctctcacctctggtgttcacacttttccggcagttttgcagtccagcggactttattccctttcatcagtcgtgaccgtcccaagttcctctctgggaacccagacatacatctgcaacgtgaaccacaaaccctctaacactaaggttgataagaaggtggaacctaagagctgcgacaaaacccacacatgtcctccctgtcctgcccctgaactgctgggcgggccttccgtgttcctgtttcctcctaagcctaaggatacactgatgattagcaggacacccgaggtcacctgcgtcgtggtcgacgtctcccacgaggaccctgaagtgaaatttaattggtatgtcgatggagtcgaggtccacaatgccaagaccaaacctagagaggaacaatataattccacatatagagtcgtgtccgtcctcacagtcctccaccaagattggctcaatggcaaagagtataaatgcaaagtgagcaataaggctctgcccgctcccattgaaaaaacaatctccaaagctaagggccaacccagagaaccccaggtgtatacactgcccccctgcagagaagagatgaccaaaaaccaggtcagcctgtggtgtctcgtgaaaggattctatcctagcgacattgccgtggagtgggagtccaatggccagcctgagaataactataagaccaccccccctgtgctggactccgatggatccttcttcctctacagcaagctgacagtggataaaagcagatggcaacagggaaacgtgttcagctgtagcgtcatgcatgaagccctgcacaatcattatacccaaaaaagcctctccctgtctccaggaggtggtggaggaagcggaggtggcggtagtcaggtgcaactggtcgagtccggcggaggcgtcgtgcaacctggcaggagcctcagactctcctgtgctgctagcggcttccctttttctagctacggaatgggatggttccgtcaggctccaggcaaggagcgagagggtgttgcaggagtgaatacggggggaagaacatcctatgcagagtccgtaaaggggcgattcaccatctcccgggacaatacacgcaacacactttacttacagatgaatagccttcgtgccgaagataccgccgtgtattactgtgctagaatacgggcggccggcacagtggcgccctacttcgactactggggccaaggaaccctggttacagtcagcagctaatag

SEQ ID NO: 8590 - DNA, 1749 bp, synthetic construct
  source 1..1749: mol_type = other DNA
gaggtgcaactggtagagagcggcgggggcttagtccagcctgggggctccctccggctgtcttgttccgcaagcggattcactttttcatccttcggcatgcactgggtcagacaagctccgggcaaaggacttgaatgggtggcatatatcagctcagggagttccaccatttactacggggacaccgttaaaggcaggttcacgattagtagggataatgccaagaattccctcttcctgcaaatgtctagccttagagccgaggatactgccgtttactactgtgcgcgagaagggggctactactacggacgctcatactacactatggattattggggccaagggacgaccgtaactgtaagctctgcatcaacgaaaggccctagtgtgtttcctctcgcacccagcagtaaaagcacctcagggggtactgctgccctgggctgccttgtgaaagattatttcccggaacctgttactgtgtcttggaatagcggcgctctcacctctggtgttcacacttttccggcagttttgcagtccagcggactttattccctttcatcagtcgtgaccgtcccaagttcctctctgggaacccagacatacatctgcaacgtgaaccacaaaccctctaacactaaggttgataagaaggtggaacctaagagctgcgacaaaacccacacatgtcctccctgtcctgcccctgaactgctgggcgggccttccgtgttcctgtttcctcctaagcctaaggatacactgatgattagcaggacacccgaggtcacctgcgtcgtggtcgacgtctcccacgaggaccctgaagtgaaatttaattggtatgtcgatggagtcgaggtccacaatgccaagaccaaacctagagaggaacaatataattccacatatagagtcgtgtccgtcctcacagtcctccaccaagattggctcaatggcaaagagtataaatgcaaagtgagcaataaggctctgcccgctcccattgaaaaaacaatctccaaagctaagggccaacccagagaaccccaggtgtatacactgcccccctgcagagaagagatgaccaaaaaccaggtcagcctgtggtgtctcgtgaaaggattctatcctagcgacattgccgtggagtgggagtccaatggccagcctgagaataactataagaccaccccccctgtgctggactccgatggatccttcttcctctacagcaagctgacagtggataaaagcagatggcaacagggaaacgtgttcagctgtagcgtcatgcatgaagccctgcacaatcattatacccaaaaaagcctctccctgtctccaggaggtggtggaggaagcggaggtggcggtagtcaggtgcaactggtcgagtccggcggaggcgtcgtgcaacctggcaggagcctcagactctcctgtgctgctagcggctacgtcgctggttacgtgggatggtacaggcaggctccaggtaaggatagggagggcgtagctgctatcgccagtgatgggatgacagcctacgcccatagtgtaaaaggcaggttcaccatctccagagataatagcaaaaacactctgtaccttcagatgaattctctcagggctgaagatactgctgtgtattactgtgcgtccggttactgctcagggtcaggctgctacttcgacagttggggccaaggaaccctggttacagtcagcagctaatag

SEQ ID NO: 8591 - DNA, 1743 bp, synthetic construct
  source 1..1743: mol_type = other DNA
gaggtgcaactggtagagagcggcgggggcttagtccagcctgggggctccctccggctgtcttgttccgcaagcggattcactttttcatccttcggcatgcactgggtcagacaagctccgggcaaaggacttgaatgggtggcatatatcagctcagggagttccaccatttactacggggacaccgttaaaggcaggttcacgattagtagggataatgccaagaattccctcttcctgcaaatgtctagccttagagccgaggatactgccgtttactactgtgcgcgagaagggggctactactacggacgctcatactacactatggattattggggccaagggacgaccgtaactgtaagctctgcatcaacgaaaggccctagtgtgtttcctctcgcacccagcagtaaaagcacctcagggggtactgctgccctgggctgccttgtgaaagattatttcccggaacctgttactgtgtcttggaatagcggcgctctcacctctggtgttcacacttttccggcagttttgcagtccagcggactttattccctttcatcagtcgtgaccgtcccaagttcctctctgggaacccagacatacatctgcaacgtgaaccacaaaccctctaacactaaggttgataagaaggtggaacctaagagctgcgacaaaacccacacatgtcctccctgtcctgcccctgaactgctgggcgggccttccgtgttcctgtttcctcctaagcctaaggatacactgatgattagcaggacacccgaggtcacctgcgtcgtggtcgacgtctcccacgaggaccctgaagtgaaatttaattggtatgtcgatggagtcgaggtccacaatgccaagaccaaacctagagaggaacaatataattccacatatagagtcgtgtccgtcctcacagtcctccaccaagattggctcaatggcaaagagtataaatgcaaagtgagcaataaggctctgcccgctcccattgaaaaaacaatctccaaagctaagggccaacccagagaaccccaggtgtatacactgcccccctgcagagaagagatgaccaaaaaccaggtcagcctgtggtgtctcgtgaaaggattctatcctagcgacattgccgtggagtgggagtccaatggccagcctgagaataactataagaccaccccccctgtgctggactccgatggatccttcttcctctacagcaagctgacagtggataaaagcagatggcaacagggaaacgtgttcagctgtagcgtcatgcatgaagccctgcacaatcattatacccaaaaaagcctctccctgtctccaggaggtggtggaggaagcggaggtggcggtagtcaggtgcaactggtcgagtccggcggaggcgtcgtgcaacctggcaggagcctcagactctcctgtgctgctagcggcttccgatataatagctacgccatggcctgggcacgtcaggctccaggcaagggacttgagtgggttgcagccatcgccggggacggaagaacagattatgcagactccgtaaaggggcgattcaccatctcccgggacaatagtaaaaacacactttacttacagatgaatagccttcgtgccgaagataccgccgtgtattactgtgctagagaggatacggccgccttcgactactggggccaaggaaccctggttacagtcagcagctaatag

SEQ ID NO: 8592 - DNA, 1773 bp, synthetic construct
  source 1..1773: mol_type = other DNA
gaggtgcaactggtagagagcggcgggggcttagtccagcctgggggctccctccggctgtcttgttccgcaagcggattcactttttcatccttcggcatgcactgggtcagacaagctccgggcaaaggacttgaatgggtggcatatatcagctcagggagttccaccatttactacggggacaccgttaaaggcaggttcacgattagtagggataatgccaagaattccctcttcctgcaaatgtctagccttagagccgaggatactgccgtttactactgtgcgcgagaagggggctactactacggacgctcatactacactatggattattggggccaagggacgaccgtaactgtaagctctgcatcaacgaaaggccctagtgtgtttcctctcgcacccagcagtaaaagcacctcagggggtactgctgccctgggctgccttgtgaaagattatttcccggaacctgttactgtgtcttggaatagcggcgctctcacctctggtgttcacacttttccggcagttttgcagtccagcggactttattccctttcatcagtcgtgaccgtcccaagttcctctctgggaacccagacatacatctgcaacgtgaaccacaaaccctctaacactaaggttgataagaaggtggaacctaagagctgcgacaaaacccacacatgtcctccctgtcctgcccctgaactgctgggcgggccttccgtgttcctgtttcctcctaagcctaaggatacactgatgattagcaggacacccgaggtcacctgcgtcgtggtcgacgtctcccacgaggaccctgaagtgaaatttaattggtatgtcgatggagtcgaggtccacaatgccaagaccaaacctagagaggaacaatataattccacatatagagtcgtgtccgtcctcacagtcctccaccaagattggctcaatggcaaagagtataaatgcaaagtgagcaataaggctctgcccgctcccattgaaaaaacaatctccaaagctaagggccaacccagagaaccccaggtgtatacactgcccccctgcagagaagagatgaccaaaaaccaggtcagcctgtggtgtctcgtgaaaggattctatcctagcgacattgccgtggagtgggagtccaatggccagcctgagaataactataagaccaccccccctgtgctggactccgatggatccttcttcctctacagcaagctgacagtggataaaagcagatggcaacagggaaacgtgttcagctgtagcgtcatgcatgaagccctgcacaatcattatacccaaaaaagcctctccctgtctccaggaggtggtggaggaagcggaggtggcggtagtcaggtgcaactggtcgagtccggcggaggcgtcgtgcaacctggcaggagcctcagactctcctgtgctgctagcggctaccgatctaatgggtactacatgggatggttccgtcaggctagtggcaaggagcgagagggtgttgcagtgatcgatagcgggggaagtacatcctatgcagactccgtaaaggggcgattcaccatctccctcgacaatgccaaaaacacactttacttacagatgaatagccttcgtgccgaagataccgccgtgtattactgtgctagaggggtaaagcggtatggagacgggggcacagacctctactattacttcgactattggggccaaggaaccctggttacagtcagcagctaatag

SEQ ID NO: 8593 - DNA, 1749 bp, synthetic construct
  source 1..1749: mol_type = other DNA
gaggtgcaactggtagagagcggcgggggcttagtccagcctgggggctccctccggctgtcttgttccgcaagcggattcactttttcatccttcggcatgcactgggtcagacaagctccgggcaaaggacttgaatgggtggcatatatcagctcagggagttccaccatttactacggggacaccgttaaaggcaggttcacgattagtagggataatgccaagaattccctcttcctgcaaatgtctagccttagagccgaggatactgccgtttactactgtgcgcgagaagggggctactactacggacgctcatactacactatggattattggggccaagggacgaccgtaactgtaagctctgcatcaacgaaaggccctagtgtgtttcctctcgcacccagcagtaaaagcacctcagggggtactgctgccctgggctgccttgtgaaagattatttcccggaacctgttactgtgtcttggaatagcggcgctctcacctctggtgttcacacttttccggcagttttgcagtccagcggactttattccctttcatcagtcgtgaccgtcccaagttcctctctgggaacccagacatacatctgcaacgtgaaccacaaaccctctaacactaaggttgataagaaggtggaacctaagagctgcgacaaaacccacacatgtcctccctgtcctgcccctgaactgctgggcgggccttccgtgttcctgtttcctcctaagcctaaggatacactgatgattagcaggacacccgaggtcacctgcgtcgtggtcgacgtctcccacgaggaccctgaagtgaaatttaattggtatgtcgatggagtcgaggtccacaatgccaagaccaaacctagagaggaacaatataattccacatatagagtcgtgtccgtcctcacagtcctccaccaagattggctcaatggcaaagagtataaatgcaaagtgagcaataaggctctgcccgctcccattgaaaaaacaatctccaaagctaagggccaacccagagaaccccaggtgtatacactgcccccctgcagagaagagatgaccaaaaaccaggtcagcctgtggtgtctcgtgaaaggattctatcctagcgacattgccgtggagtgggagtccaatggccagcctgagaataactataagaccaccccccctgtgctggactccgatggatccttcttcctctacagcaagctgacagtggataaaagcagatggcaacagggaaacgtgttcagctgtagcgtcatgcatgaagccctgcacaatcattatacccaaaaaagcctctccctgtctccaggaggtggtggaggaagcggaggtggcggtagtcaggtgcaactggtcgagtccggcggaggcgtcgtgcaacctggcaggagcctcagactctcctgtgctgctagcggctacaccttacctatgagcaccgcatgggcgaggcaagcacctggaaaagggctagaatgggttgctgcaatcgcctccgacgggagaacagactatgctgactcagtcaaggggaggtttaccatttcgcgagataactccaagaatacagtgtatctgcaaatgaattcactgcgcgctgaagatactgccgtctactattgcgccactctgtggtggtacggcggcagaacgttcgacagttggggccaaggaaccctggttacagtcagcagctaatag

SEQ ID NO: 8594 - DNA, 1770 bp, synthetic construct
  source 1..1770: mol_type = other DNA
gaggtgcaactggtagagagcggcgggggcttagtccagcctgggggctccctccggctgtcttgttccgcaagcggattcactttttcatccttcggcatgcactgggtcagacaagctccgggcaaaggacttgaatgggtggcatatatcagctcagggagttccaccatttactacggggacaccgttaaaggcaggttcacgattagtagggataatgccaagaattccctcttcctgcaaatgtctagccttagagccgaggatactgccgtttactactgtgcgcgagaagggggctactactacggacgctcatactacactatggattattggggccaagggacgaccgtaactgtaagctctgcatcaacgaaaggccctagtgtgtttcctctcgcacccagcagtaaaagcacctcagggggtactgctgccctgggctgccttgtgaaagattatttcccggaacctgttactgtgtcttggaatagcggcgctctcacctctggtgttcacacttttccggcagttttgcagtccagcggactttattccctttcatcagtcgtgaccgtcccaagttcctctctgggaacccagacatacatctgcaacgtgaaccacaaaccctctaacactaaggttgataagaaggtggaacctaagagctgcgacaaaacccacacatgtcctccctgtcctgcccctgaactgctgggcgggccttccgtgttcctgtttcctcctaagcctaaggatacactgatgattagcaggacacccgaggtcacctgcgtcgtggtcgacgtctcccacgaggaccctgaagtgaaatttaattggtatgtcgatggagtcgaggtccacaatgccaagaccaaacctagagaggaacaatataattccacatatagagtcgtgtccgtcctcacagtcctccaccaagattggctcaatggcaaagagtataaatgcaaagtgagcaataaggctctgcccgctcccattgaaaaaacaatctccaaagctaagggccaacccagagaaccccaggtgtatacactgcccccctgcagagaagagatgaccaaaaaccaggtcagcctgtggtgtctcgtgaaaggattctatcctagcgacattgccgtggagtgggagtccaatggccagcctgagaataactataagaccaccccccctgtgctggactccgatggatccttcttcctctacagcaagctgacagtggataaaagcagatggcaacagggaaacgtgttcagctgtagcgtcatgcatgaagccctgcacaatcattatacccaaaaaagcctctccctgtctccaggaggtggtggaggaagcggaggtggcggtagtcaggtgcaactggtcgagtccggcggaggcgtcgtgcaacctggcaggagcctcagactctcctgtgctgctagcggcttcacctttgatgacttcgacatgggatggtaccgtcaggctccaggcaaggaccgagagggtgttgcagtgatccggagcgacggaatcctggcctatagtgactccgtaaaggggcgattcaccatctcccgggacaatagtaaaaacacagtctacttacagatgaatagccttcgtgccgaagataccgccgtgtattactgtgctagaagccggagcaactatagtagcgacgcctacgcctactactggttcgacgtgtggggccaaggaaccctggttacagtcagcagctaatag

SEQ ID NO: 8595 - DNA, 1752 bp, synthetic construct
  source 1..1752: mol_type = other DNA
gaggtgcaactggtagagagcggcgggggcttagtccagcctgggggctccctccggctgtcttgttccgcaagcggattcactttttcatccttcggcatgcactgggtcagacaagctccgggcaaaggacttgaatgggtggcatatatcagctcagggagttccaccatttactacggggacaccgttaaaggcaggttcacgattagtagggataatgccaagaattccctcttcctgcaaatgtctagccttagagccgaggatactgccgtttactactgtgcgcgagaagggggctactactacggacgctcatactacactatggattattggggccaagggacgaccgtaactgtaagctctgcatcaacgaaaggccctagtgtgtttcctctcgcacccagcagtaaaagcacctcagggggtactgctgccctgggctgccttgtgaaagattatttcccggaacctgttactgtgtcttggaatagcggcgctctcacctctggtgttcacacttttccggcagttttgcagtccagcggactttattccctttcatcagtcgtgaccgtcccaagttcctctctgggaacccagacatacatctgcaacgtgaaccacaaaccctctaacactaaggttgataagaaggtggaacctaagagctgcgacaaaacccacacatgtcctccctgtcctgcccctgaactgctgggcgggccttccgtgttcctgtttcctcctaagcctaaggatacactgatgattagcaggacacccgaggtcacctgcgtcgtggtcgacgtctcccacgaggaccctgaagtgaaatttaattggtatgtcgatggagtcgaggtccacaatgccaagaccaaacctagagaggaacaatataattccacatatagagtcgtgtccgtcctcacagtcctccaccaagattggctcaatggcaaagagtataaatgcaaagtgagcaataaggctctgcccgctcccattgaaaaaacaatctccaaagctaagggccaacccagagaaccccaggtgtatacactgcccccctgcagagaagagatgaccaaaaaccaggtcagcctgtggtgtctcgtgaaaggattctatcctagcgacattgccgtggagtgggagtccaatggccagcctgagaataactataagaccaccccccctgtgctggactccgatggatccttcttcctctacagcaagctgacagtggataaaagcagatggcaacagggaaacgtgttcagctgtagcgtcatgcatgaagccctgcacaatcattatacccaaaaaagcctctccctgtctccaggaggtggtggaggaagcggaggtggcggtagtcaggtgcaactggtcgagtccggcggaggcgtcgtgcaacctggcaggagcctcagactctcctgtgctgctagcggcggatttgatgatgcagacgccgagtgggggtgggctaggcaagcacctgggaagggcctcgaatgggtggccgccatcgcgggggacggaagaaccgattacgccggctcagtgaagggccggtttaccatttccagggataactctaagaacactgtgtatcttcaaatgaactccttacgggctgaagacaccgcagtctactattgtgccaagaatgggcagtcaggattcagcttcgacccctggggccaaggaaccctggttacagtcagcagctaatag

SEQ ID NO: 8596 - DNA, 1761 bp, synthetic construct
  source 1..1761: mol_type = other DNA
gaggtgcaactggtagagagcggcgggggcttagtccagcctgggggctccctccggctgtcttgttccgcaagcggattcactttttcatccttcggcatgcactgggtcagacaagctccgggcaaaggacttgaatgggtggcatatatcagctcagggagttccaccatttactacggggacaccgttaaaggcaggttcacgattagtagggataatgccaagaattccctcttcctgcaaatgtctagccttagagccgaggatactgccgtttactactgtgcgcgagaagggggctactactacggacgctcatactacactatggattattggggccaagggacgaccgtaactgtaagctctgcatcaacgaaaggccctagtgtgtttcctctcgcacccagcagtaaaagcacctcagggggtactgctgccctgggctgccttgtgaaagattatttcccggaacctgttactgtgtcttggaatagcggcgctctcacctctggtgttcacacttttccggcagttttgcagtccagcggactttattccctttcatcagtcgtgaccgtcccaagttcctctctgggaacccagacatacatctgcaacgtgaaccacaaaccctctaacactaaggttgataagaaggtggaacctaagagctgcgacaaaacccacacatgtcctccctgtcctgcccctgaactgctgggcgggccttccgtgttcctgtttcctcctaagcctaaggatacactgatgattagcaggacacccgaggtcacctgcgtcgtggtcgacgtctcccacgaggaccctgaagtgaaatttaattggtatgtcgatggagtcgaggtccacaatgccaagaccaaacctagagaggaacaatataattccacatatagagtcgtgtccgtcctcacagtcctccaccaagattggctcaatggcaaagagtataaatgcaaagtgagcaataaggctctgcccgctcccattgaaaaaacaatctccaaagctaagggccaacccagagaaccccaggtgtatacactgcccccctgcagagaagagatgaccaaaaaccaggtcagcctgtggtgtctcgtgaaaggattctatcctagcgacattgccgtggagtgggagtccaatggccagcctgagaataactataagaccaccccccctgtgctggactccgatggatccttcttcctctacagcaagctgacagtggataaaagcagatggcaacagggaaacgtgttcagctgtagcgtcatgcatgaagccctgcacaatcattatacccaaaaaagcctctccctgtctccaggaggtggtggaggaagcggaggtggcggtagtcaggtgcaactggtcgagtccggcggaggcgtcgtgcaacctggcaggagcctcagactctcctgtgctgctagcggctacaccttacctatgagcaccgcatgggcgaggcaagcacctggaaaagggctagaatgggttgctgcaatcgcctccgacgggagaacagactatgctgactcagtcaaggggaggtttaccatttcgcgagataactccaagaatacagtgtatctgcaaatgaattcactgcgcgctgaagatactgccgtctactattgcgcctctctgagccgggggacctatagtagcgggtggaagtgggacgactattggggccaaggaaccctggttacagtcagcagctaatag

SEQ ID NO: 8597 - DNA, 1758 bp, synthetic construct
  source 1..1758: mol_type = other DNA
gaggtgcaactggtagagagcggcgggggcttagtccagcctgggggctccctccggctgtcttgttccgcaagcggattcactttttcatccttcggcatgcactgggtcagacaagctccgggcaaaggacttgaatgggtggcatatatcagctcagggagttccaccatttactacggggacaccgttaaaggcaggttcacgattagtagggataatgccaagaattccctcttcctgcaaatgtctagccttagagccgaggatactgccgtttactactgtgcgcgagaagggggctactactacggacgctcatactacactatggattattggggccaagggacgaccgtaactgtaagctctgcatcaacgaaaggccctagtgtgtttcctctcgcacccagcagtaaaagcacctcagggggtactgctgccctgggctgccttgtgaaagattatttcccggaacctgttactgtgtcttggaatagcggcgctctcacctctggtgttcacacttttccggcagttttgcagtccagcggactttattccctttcatcagtcgtgaccgtcccaagttcctctctgggaacccagacatacatctgcaacgtgaaccacaaaccctctaacactaaggttgataagaaggtggaacctaagagctgcgacaaaacccacacatgtcctccctgtcctgcccctgaactgctgggcgggccttccgtgttcctgtttcctcctaagcctaaggatacactgatgattagcaggacacccgaggtcacctgcgtcgtggtcgacgtctcccacgaggaccctgaagtgaaatttaattggtatgtcgatggagtcgaggtccacaatgccaagaccaaacctagagaggaacaatataattccacatatagagtcgtgtccgtcctcacagtcctccaccaagattggctcaatggcaaagagtataaatgcaaagtgagcaataaggctctgcccgctcccattgaaaaaacaatctccaaagctaagggccaacccagagaaccccaggtgtatacactgcccccctgcagagaagagatgaccaaaaaccaggtcagcctgtggtgtctcgtgaaaggattctatcctagcgacattgccgtggagtgggagtccaatggccagcctgagaataactataagaccaccccccctgtgctggactccgatggatccttcttcctctacagcaagctgacagtggataaaagcagatggcaacagggaaacgtgttcagctgtagcgtcatgcatgaagccctgcacaatcattatacccaaaaaagcctctccctgtctccaggaggtggtggaggaagcggaggtggcggtagtcaggtgcaactggtcgagtccggcggaggcgtcgtgcaacctggcaggagcctcagactctcctgtgctgctagcggcttcaccttttctagctacgccatgtcatggttccgtcaggctctgggcaaggaccgagagggtgttgcagccatcgatagcgacggaacaacatcctatggagagtccgtaaaggggcgattcaccatctcccgggacaatagtaaaaacacagtctacttacagatgaatagccttcgtgccgaagataccgccgtgtattactgtgctagagcgtggggggtaggcgacgactactacagaatggactactggggccaaggaaccctggttacagtcagcagctaatag

SEQ ID NO: 8598 - DNA, 1752 bp, synthetic construct
  source 1..1752: mol_type = other DNA
gaggtgcaactggtagagagcggcgggggcttagtccagcctgggggctccctccggctgtcttgttccgcaagcggattcactttttcatccttcggcatgcactgggtcagacaagctccgggcaaaggacttgaatgggtggcatatatcagctcagggagttccaccatttactacggggacaccgttaaaggcaggttcacgattagtagggataatgccaagaattccctcttcctgcaaatgtctagccttagagccgaggatactgccgtttactactgtgcgcgagaagggggctactactacggacgctcatactacactatggattattggggccaagggacgaccgtaactgtaagctctgcatcaacgaaaggccctagtgtgtttcctctcgcacccagcagtaaaagcacctcagggggtactgctgccctgggctgccttgtgaaagattatttcccggaacctgttactgtgtcttggaatagcggcgctctcacctctggtgttcacacttttccggcagttttgcagtccagcggactttattccctttcatcagtcgtgaccgtcccaagttcctctctgggaacccagacatacatctgcaacgtgaaccacaaaccctctaacactaaggttgataagaaggtggaacctaagagctgcgacaaaacccacacatgtcctccctgtcctgcccctgaactgctgggcgggccttccgtgttcctgtttcctcctaagcctaaggatacactgatgattagcaggacacccgaggtcacctgcgtcgtggtcgacgtctcccacgaggaccctgaagtgaaatttaattggtatgtcgatggagtcgaggtccacaatgccaagaccaaacctagagaggaacaatataattccacatatagagtcgtgtccgtcctcacagtcctccaccaagattggctcaatggcaaagagtataaatgcaaagtgagcaataaggctctgcccgctcccattgaaaaaacaatctccaaagctaagggccaacccagagaaccccaggtgtatacactgcccccctgcagagaagagatgaccaaaaaccaggtcagcctgtggtgtctcgtgaaaggattctatcctagcgacattgccgtggagtgggagtccaatggccagcctgagaataactataagaccaccccccctgtgctggactccgatggatccttcttcctctacagcaagctgacagtggataaaagcagatggcaacagggaaacgtgttcagctgtagcgtcatgcatgaagccctgcacaatcattatacccaaaaaagcctctccctgtctccaggaggtggtggaggaagcggaggtggcggtagtcaggtgcaactggtcgagtccggcggaggcgtcgtgcaacctggcaggagcctcagactctcctgtgctgctagcggctacaccgctactaactacgccatgggatgggtgcgtagggctccaggcaagggagaagagtgggttgcaacaatcgatagcgacggaagagcatcctatgcagactccgtaaaggggcgattcaccatctccgccgacactagtaaaaacacagcttacttacagatgaatagccttcgtgccgaagataccgccgtgtattactgtggtagactgcagtactcatcaggatggtactcagactactggggccaaggaaccctggttacagtcagcagctaatag

SEQ ID NO: 8599 - DNA, 1749 bp, synthetic construct
  source 1..1749: mol_type = other DNA
gaggtgcaactggtagagagcggcgggggcttagtccagcctgggggctccctccggctgtcttgttccgcaagcggattcactttttcatccttcggcatgcactgggtcagacaagctccgggcaaaggacttgaatgggtggcatatatcagctcagggagttccaccatttactacggggacaccgttaaaggcaggttcacgattagtagggataatgccaagaattccctcttcctgcaaatgtctagccttagagccgaggatactgccgtttactactgtgcgcgagaagggggctactactacggacgctcatactacactatggattattggggccaagggacgaccgtaactgtaagctctgcatcaacgaaaggccctagtgtgtttcctctcgcacccagcagtaaaagcacctcagggggtactgctgccctgggctgccttgtgaaagattatttcccggaacctgttactgtgtcttggaatagcggcgctctcacctctggtgttcacacttttccggcagttttgcagtccagcggactttattccctttcatcagtcgtgaccgtcccaagttcctctctgggaacccagacatacatctgcaacgtgaaccacaaaccctctaacactaaggttgataagaaggtggaacctaagagctgcgacaaaacccacacatgtcctccctgtcctgcccctgaactgctgggcgggccttccgtgttcctgtttcctcctaagcctaaggatacactgatgattagcaggacacccgaggtcacctgcgtcgtggtcgacgtctcccacgaggaccctgaagtgaaatttaattggtatgtcgatggagtcgaggtccacaatgccaagaccaaacctagagaggaacaatataattccacatatagagtcgtgtccgtcctcacagtcctccaccaagattggctcaatggcaaagagtataaatgcaaagtgagcaataaggctctgcccgctcccattgaaaaaacaatctccaaagctaagggccaacccagagaaccccaggtgtatacactgcccccctgcagagaagagatgaccaaaaaccaggtcagcctgtggtgtctcgtgaaaggattctatcctagcgacattgccgtggagtgggagtccaatggccagcctgagaataactataagaccaccccccctgtgctggactccgatggatccttcttcctctacagcaagctgacagtggataaaagcagatggcaacagggaaacgtgttcagctgtagcgtcatgcatgaagccctgcacaatcattatacccaaaaaagcctctccctgtctccaggaggtggtggaggaagcggaggtggcggtagtcaggtgcaactggtcgagtccggcggaggcgtcgtgcaacctggcaggagcctcagactctcctgtgctgctagcggcttctcctttgatgacctggacatgggatgggcacgtcaggctccaggcaagggacttgagtgggttgcaacaatcaccaacggggactacacacggtatagtgactccgtaaaggggcgattcaccatctcccgggacaatagtaaaaacacactttacttacagatgaatagccttcgtgccgaagataccgccgtgtattactgtgctagagacctcagcggctcactgtacttcgactactggggccaaggaaccctggttacagtcagcagctaatag

SEQ ID NO: 8600 - DNA, 1758 bp, synthetic construct
  source 1..1758: mol_type = other DNA
gaggtgcaactggtagagagcggcgggggcttagtccagcctgggggctccctccggctgtcttgttccgcaagcggattcactttttcatccttcggcatgcactgggtcagacaagctccgggcaaaggacttgaatgggtggcatatatcagctcagggagttccaccatttactacggggacaccgttaaaggcaggttcacgattagtagggataatgccaagaattccctcttcctgcaaatgtctagccttagagccgaggatactgccgtttactactgtgcgcgagaagggggctactactacggacgctcatactacactatggattattggggccaagggacgaccgtaactgtaagctctgcatcaacgaaaggccctagtgtgtttcctctcgcacccagcagtaaaagcacctcagggggtactgctgccctgggctgccttgtgaaagattatttcccggaacctgttactgtgtcttggaatagcggcgctctcacctctggtgttcacacttttccggcagttttgcagtccagcggactttattccctttcatcagtcgtgaccgtcccaagttcctctctgggaacccagacatacatctgcaacgtgaaccacaaaccctctaacactaaggttgataagaaggtggaacctaagagctgcgacaaaacccacacatgtcctccctgtcctgcccctgaactgctgggcgggccttccgtgttcctgtttcctcctaagcctaaggatacactgatgattagcaggacacccgaggtcacctgcgtcgtggtcgacgtctcccacgaggaccctgaagtgaaatttaattggtatgtcgatggagtcgaggtccacaatgccaagaccaaacctagagaggaacaatataattccacatatagagtcgtgtccgtcctcacagtcctccaccaagattggctcaatggcaaagagtataaatgcaaagtgagcaataaggctctgcccgctcccattgaaaaaacaatctccaaagctaagggccaacccagagaaccccaggtgtatacactgcccccctgcagagaagagatgaccaaaaaccaggtcagcctgtggtgtctcgtgaaaggattctatcctagcgacattgccgtggagtgggagtccaatggccagcctgagaataactataagaccaccccccctgtgctggactccgatggatccttcttcctctacagcaagctgacagtggataaaagcagatggcaacagggaaacgtgttcagctgtagcgtcatgcatgaagccctgcacaatcattatacccaaaaaagcctctccctgtctccaggaggtggtggaggaagcggaggtggcggtagtcaggtgcaactggtcgagtccggcggaggcgtcgtgcaacctggcaggagcctcagactctcctgtgctgctagcggctacaccgtttctaacaactgcatgggatggttccgtcaggctccaggcaaggagcgagagttagttgcagtgatcggcagcgacggacacgcaacctatgcagcctccgtagaggggcgattcaccatctcccgggacaatgccaaaaggatggtctacttacagatgaatagccttcgtgccgaagataccgccgtgtattactgtgctagagcgcacccgcggggcagtgggagctactacttcgactactggggccaaggaaccctggttacagtcagcagctaatag

SEQ ID NO: 8601 - DNA, 1755 bp, synthetic construct
  source 1..1755: mol_type = other DNA
gaggtgcaactggtagagagcggcgggggcttagtccagcctgggggctccctccggctgtcttgttccgcaagcggattcactttttcatccttcggcatgcactgggtcagacaagctccgggcaaaggacttgaatgggtggcatatatcagctcagggagttccaccatttactacggggacaccgttaaaggcaggttcacgattagtagggataatgccaagaattccctcttcctgcaaatgtctagccttagagccgaggatactgccgtttactactgtgcgcgagaagggggctactactacggacgctcatactacactatggattattggggccaagggacgaccgtaactgtaagctctgcatcaacgaaaggccctagtgtgtttcctctcgcacccagcagtaaaagcacctcagggggtactgctgccctgggctgccttgtgaaagattatttcccggaacctgttactgtgtcttggaatagcggcgctctcacctctggtgttcacacttttccggcagttttgcagtccagcggactttattccctttcatcagtcgtgaccgtcccaagttcctctctgggaacccagacatacatctgcaacgtgaaccacaaaccctctaacactaaggttgataagaaggtggaacctaagagctgcgacaaaacccacacatgtcctccctgtcctgcccctgaactgctgggcgggccttccgtgttcctgtttcctcctaagcctaaggatacactgatgattagcaggacacccgaggtcacctgcgtcgtggtcgacgtctcccacgaggaccctgaagtgaaatttaattggtatgtcgatggagtcgaggtccacaatgccaagaccaaacctagagaggaacaatataattccacatatagagtcgtgtccgtcctcacagtcctccaccaagattggctcaatggcaaagagtataaatgcaaagtgagcaataaggctctgcccgctcccattgaaaaaacaatctccaaagctaagggccaacccagagaaccccaggtgtatacactgcccccctgcagagaagagatgaccaaaaaccaggtcagcctgtggtgtctcgtgaaaggattctatcctagcgacattgccgtggagtgggagtccaatggccagcctgagaataactataagaccaccccccctgtgctggactccgatggatccttcttcctctacagcaagctgacagtggataaaagcagatggcaacagggaaacgtgttcagctgtagcgtcatgcatgaagccctgcacaatcattatacccaaaaaagcctctccctgtctccaggaggtggtggaggaagcggaggtggcggtagtcaggtgcaactggtcgagtccggcggaggcgtcgtgcaacctggcaggagcctcagactctcctgtgctgctagcggcttccgatataatagctacgccatggcctgggcacgtcaggctccaggcaagggagaagagtgggttgcagccatcgatggggacggaacaacagattatgcagactccgtaaaggggcgattcaccatctccgccgacactagtaaaaacacagtctacttacagatgaatagccttcgtgccgaagataccgccgtgtattactgtgctacagtgaagaagttctggaacgggtacgccttcgactcatggggccaaggaaccctggttacagtcagcagctaatag

SEQ ID NO: 8602 - DNA, 1758 bp, synthetic construct
  source 1..1758: mol_type = other DNA
gaggtgcaactggtagagagcggcgggggcttagtccagcctgggggctccctccggctgtcttgttccgcaagcggattcactttttcatccttcggcatgcactgggtcagacaagctccgggcaaaggacttgaatgggtggcatatatcagctcagggagttccaccatttactacggggacaccgttaaaggcaggttcacgattagtagggataatgccaagaattccctcttcctgcaaatgtctagccttagagccgaggatactgccgtttactactgtgcgcgagaagggggctactactacggacgctcatactacactatggattattggggccaagggacgaccgtaactgtaagctctgcatcaacgaaaggccctagtgtgtttcctctcgcacccagcagtaaaagcacctcagggggtactgctgccctgggctgccttgtgaaagattatttcccggaacctgttactgtgtcttggaatagcggcgctctcacctctggtgttcacacttttccggcagttttgcagtccagcggactttattccctttcatcagtcgtgaccgtcccaagttcctctctgggaacccagacatacatctgcaacgtgaaccacaaaccctctaacactaaggttgataagaaggtggaacctaagagctgcgacaaaacccacacatgtcctccctgtcctgcccctgaactgctgggcgggccttccgtgttcctgtttcctcctaagcctaaggatacactgatgattagcaggacacccgaggtcacctgcgtcgtggtcgacgtctcccacgaggaccctgaagtgaaatttaattggtatgtcgatggagtcgaggtccacaatgccaagaccaaacctagagaggaacaatataattccacatatagagtcgtgtccgtcctcacagtcctccaccaagattggctcaatggcaaagagtataaatgcaaagtgagcaataaggctctgcccgctcccattgaaaaaacaatctccaaagctaagggccaacccagagaaccccaggtgtatacactgcccccctgcagagaagagatgaccaaaaaccaggtcagcctgtggtgtctcgtgaaaggattctatcctagcgacattgccgtggagtgggagtccaatggccagcctgagaataactataagaccaccccccctgtgctggactccgatggatccttcttcctctacagcaagctgacagtggataaaagcagatggcaacagggaaacgtgttcagctgtagcgtcatgcatgaagccctgcacaatcattatacccaaaaaagcctctccctgtctccaggaggtggtggaggaagcggaggtggcggtagtcaggtgcaactggtcgagtccggcggaggcgtcgtgcaacctggcaggagcctcagactctcctgtgctgctagcggcttcccttttggtgggtactcggtgggatggttccgtcaggctccaggcaaggagcgagagggtgttgcagtgatcgatagggacggaagtacaacctatgcagactccgtaaaggggcgattcaccatctcccgggacaatgccaaagacacactttacttacagatgaatagccttcgtgccgaagataccgccgtgtattactgtgctagagggggcaggaagggcctggggtggtactacttcgactactggggccaaggaaccctggttacagtcagcagctaatag

SEQ ID NO: 8603 - DNA, 1746 bp, synthetic construct
  source 1..1746: mol_type = other DNA
gaggtgcaactggtagagagcggcgggggcttagtccagcctgggggctccctccggctgtcttgttccgcaagcggattcactttttcatccttcggcatgcactgggtcagacaagctccgggcaaaggacttgaatgggtggcatatatcagctcagggagttccaccatttactacggggacaccgttaaaggcaggttcacgattagtagggataatgccaagaattccctcttcctgcaaatgtctagccttagagccgaggatactgccgtttactactgtgcgcgagaagggggctactactacggacgctcatactacactatggattattggggccaagggacgaccgtaactgtaagctctgcatcaacgaaaggccctagtgtgtttcctctcgcacccagcagtaaaagcacctcagggggtactgctgccctgggctgccttgtgaaagattatttcccggaacctgttactgtgtcttggaatagcggcgctctcacctctggtgttcacacttttccggcagttttgcagtccagcggactttattccctttcatcagtcgtgaccgtcccaagttcctctctgggaacccagacatacatctgcaacgtgaaccacaaaccctctaacactaaggttgataagaaggtggaacctaagagctgcgacaaaacccacacatgtcctccctgtcctgcccctgaactgctgggcgggccttccgtgttcctgtttcctcctaagcctaaggatacactgatgattagcaggacacccgaggtcacctgcgtcgtggtcgacgtctcccacgaggaccctgaagtgaaatttaattggtatgtcgatggagtcgaggtccacaatgccaagaccaaacctagagaggaacaatataattccacatatagagtcgtgtccgtcctcacagtcctccaccaagattggctcaatggcaaagagtataaatgcaaagtgagcaataaggctctgcccgctcccattgaaaaaacaatctccaaagctaagggccaacccagagaaccccaggtgtatacactgcccccctgcagagaagagatgaccaaaaaccaggtcagcctgtggtgtctcgtgaaaggattctatcctagcgacattgccgtggagtgggagtccaatggccagcctgagaataactataagaccaccccccctgtgctggactccgatggatccttcttcctctacagcaagctgacagtggataaaagcagatggcaacagggaaacgtgttcagctgtagcgtcatgcatgaagccctgcacaatcattatacccaaaaaagcctctccctgtctccaggaggtggtggaggaagcggaggtggcggtagtcaggtgcaactggtcgagtccggcggaggcgtcgtgcaacctggcaggagcctcagactctcctgtgctgctagcggcttctccttttctagctaccccatgacctgggtgcgtcaggctccaggcaagggacccgagtgggttagtatgatcaatagggacggaagtacatattatggagactccgtaaaggggcgattcgccatctcccgggacaatgccaaaaacacactttacttacagatgaatagccttcgtgccgaagataccgccgtgtattactgtgctagagacggcgggtcatatgacatggacgtatggggccaaggaaccctggttacagtcagcagctaatag

SEQ ID NO: 8604 - DNA, 1743 bp, synthetic construct
  source 1..1743: mol_type = other DNA
gaggtgcaactggtagagagcggcgggggcttagtccagcctgggggctccctccggctgtcttgttccgcaagcggattcactttttcatccttcggcatgcactgggtcagacaagctccgggcaaaggacttgaatgggtggcatatatcagctcagggagttccaccatttactacggggacaccgttaaaggcaggttcacgattagtagggataatgccaagaattccctcttcctgcaaatgtctagccttagagccgaggatactgccgtttactactgtgcgcgagaagggggctactactacggacgctcatactacactatggattattggggccaagggacgaccgtaactgtaagctctgcatcaacgaaaggccctagtgtgtttcctctcgcacccagcagtaaaagcacctcagggggtactgctgccctgggctgccttgtgaaagattatttcccggaacctgttactgtgtcttggaatagcggcgctctcacctctggtgttcacacttttccggcagttttgcagtccagcggactttattccctttcatcagtcgtgaccgtcccaagttcctctctgggaacccagacatacatctgcaacgtgaaccacaaaccctctaacactaaggttgataagaaggtggaacctaagagctgcgacaaaacccacacatgtcctccctgtcctgcccctgaactgctgggcgggccttccgtgttcctgtttcctcctaagcctaaggatacactgatgattagcaggacacccgaggtcacctgcgtcgtggtcgacgtctcccacgaggaccctgaagtgaaatttaattggtatgtcgatggagtcgaggtccacaatgccaagaccaaacctagagaggaacaatataattccacatatagagtcgtgtccgtcctcacagtcctccaccaagattggctcaatggcaaagagtataaatgcaaagtgagcaataaggctctgcccgctcccattgaaaaaacaatctccaaagctaagggccaacccagagaaccccaggtgtatacactgcccccctgcagagaagagatgaccaaaaaccaggtcagcctgtggtgtctcgtgaaaggattctatcctagcgacattgccgtggagtgggagtccaatggccagcctgagaataactataagaccaccccccctgtgctggactccgatggatccttcttcctctacagcaagctgacagtggataaaagcagatggcaacagggaaacgtgttcagctgtagcgtcatgcatgaagccctgcacaatcattatacccaaaaaagcctctccctgtctccaggaggtggtggaggaagcggaggtggcggtagtcaggtgcaactggtcgagtccggcggaggcgtcgtgcaacctggcaggagcctcagactctcctgtgctgctagcggctacaccttacctatgagcaccgcatgggcgaggcaagcacctggaaaagggctagaatgggttgctgcaatcgcctccgacgggagaacagactatgctgactcagtcaaggggaggtttaccatttcgcgagataactccaagaatacagtgtatctgcaaatgaattcactgcgcgctgaagatactgccgtctactattgcgccactctgagcatggcgcggaatagtgactactggggccaaggaaccctggttacagtcagcagctaatag

SEQ ID NO: 8605 - DNA, 1749 bp, synthetic construct
  source 1..1749: mol_type = other DNA
gaggtgcaactggtagagagcggcgggggcttagtccagcctgggggctccctccggctgtcttgttccgcaagcggattcactttttcatccttcggcatgcactgggtcagacaagctccgggcaaaggacttgaatgggtggcatatatcagctcagggagttccaccatttactacggggacaccgttaaaggcaggttcacgattagtagggataatgccaagaattccctcttcctgcaaatgtctagccttagagccgaggatactgccgtttactactgtgcgcgagaagggggctactactacggacgctcatactacactatggattattggggccaagggacgaccgtaactgtaagctctgcatcaacgaaaggccctagtgtgtttcctctcgcacccagcagtaaaagcacctcagggggtactgctgccctgggctgccttgtgaaagattatttcccggaacctgttactgtgtcttggaatagcggcgctctcacctctggtgttcacacttttccggcagttttgcagtccagcggactttattccctttcatcagtcgtgaccgtcccaagttcctctctgggaacccagacatacatctgcaacgtgaaccacaaaccctctaacactaaggttgataagaaggtggaacctaagagctgcgacaaaacccacacatgtcctccctgtcctgcccctgaactgctgggcgggccttccgtgttcctgtttcctcctaagcctaaggatacactgatgattagcaggacacccgaggtcacctgcgtcgtggtcgacgtctcccacgaggaccctgaagtgaaatttaattggtatgtcgatggagtcgaggtccacaatgccaagaccaaacctagagaggaacaatataattccacatatagagtcgtgtccgtcctcacagtcctccaccaagattggctcaatggcaaagagtataaatgcaaagtgagcaataaggctctgcccgctcccattgaaaaaacaatctccaaagctaagggccaacccagagaaccccaggtgtatacactgcccccctgcagagaagagatgaccaaaaaccaggtcagcctgtggtgtctcgtgaaaggattctatcctagcgacattgccgtggagtgggagtccaatggccagcctgagaataactataagaccaccccccctgtgctggactccgatggatccttcttcctctacagcaagctgacagtggataaaagcagatggcaacagggaaacgtgttcagctgtagcgtcatgcatgaagccctgcacaatcattatacccaaaaaagcctctccctgtctccaggaggtggtggaggaagcggaggtggcggtagtcaggtgcaactggtcgagtccggcggaggcgtcgtgcaacctggcaggagcctcagactctcctgtgctgctagcggcttcaccatttctgggtacaccatgcactggttccgtcaggctccaggcaagggacttgagtgggttgcaagtatcgatacggggggagacacaacctatctgccctccgtaaaggggcgattcaccatctcccgggacaatagtaaaaacacactttacttacagatgaatagccttcgtgccgaagataccgccgtgtattactgtgctacagaccggaacggcggcggagcgttcgacgtgtggggccaaggaaccctggttacagtcagcagctaatag

SEQ ID NO: 8606 - DNA, 1743 bp, synthetic construct
  source 1..1743: mol_type = other DNA
gaggtgcaactggtagagagcggcgggggcttagtccagcctgggggctccctccggctgtcttgttccgcaagcggattcactttttcatccttcggcatgcactgggtcagacaagctccgggcaaaggacttgaatgggtggcatatatcagctcagggagttccaccatttactacggggacaccgttaaaggcaggttcacgattagtagggataatgccaagaattccctcttcctgcaaatgtctagccttagagccgaggatactgccgtttactactgtgcgcgagaagggggctactactacggacgctcatactacactatggattattggggccaagggacgaccgtaactgtaagctctgcatcaacgaaaggccctagtgtgtttcctctcgcacccagcagtaaaagcacctcagggggtactgctgccctgggctgccttgtgaaagattatttcccggaacctgttactgtgtcttggaatagcggcgctctcacctctggtgttcacacttttccggcagttttgcagtccagcggactttattccctttcatcagtcgtgaccgtcccaagttcctctctgggaacccagacatacatctgcaacgtgaaccacaaaccctctaacactaaggttgataagaaggtggaacctaagagctgcgacaaaacccacacatgtcctccctgtcctgcccctgaactgctgggcgggccttccgtgttcctgtttcctcctaagcctaaggatacactgatgattagcaggacacccgaggtcacctgcgtcgtggtcgacgtctcccacgaggaccctgaagtgaaatttaattggtatgtcgatggagtcgaggtccacaatgccaagaccaaacctagagaggaacaatataattccacatatagagtcgtgtccgtcctcacagtcctccaccaagattggctcaatggcaaagagtataaatgcaaagtgagcaataaggctctgcccgctcccattgaaaaaacaatctccaaagctaagggccaacccagagaaccccaggtgtatacactgcccccctgcagagaagagatgaccaaaaaccaggtcagcctgtggtgtctcgtgaaaggattctatcctagcgacattgccgtggagtgggagtccaatggccagcctgagaataactataagaccaccccccctgtgctggactccgatggatccttcttcctctacagcaagctgacagtggataaaagcagatggcaacagggaaacgtgttcagctgtagcgtcatgcatgaagccctgcacaatcattatacccaaaaaagcctctccctgtctccaggaggtggtggaggaagcggaggtggcggtagtcaggtgcaactggtcgagtccggcggaggcgtcgtgcaacctggcaggagcctcagactctcctgtgctgctagcggcttcatttctacttactacatgagttgggtgaggcaagcacctggaaaagggcccgaatgggtttctacaacaggagccgacgggacaacatactatgctgactcagtcaacgggaggtttaccgtctcgcaggataacgctaagaatacagtgtatctgcaaatgaattcactgcgcgctgaagatactgccgtctactattgcgcccgctacgaggatgggcccggcttcgacatatggggccaaggaaccctggttacagtcagcagctaatag

SEQ ID NO: 8607 - DNA, 1755 bp, synthetic construct
  source 1..1755: mol_type = other DNA
gaggtgcaactggtagagagcggcgggggcttagtccagcctgggggctccctccggctgtcttgttccgcaagcggattcactttttcatccttcggcatgcactgggtcagacaagctccgggcaaaggacttgaatgggtggcatatatcagctcagggagttccaccatttactacggggacaccgttaaaggcaggttcacgattagtagggataatgccaagaattccctcttcctgcaaatgtctagccttagagccgaggatactgccgtttactactgtgcgcgagaagggggctactactacggacgctcatactacactatggattattggggccaagggacgaccgtaactgtaagctctgcatcaacgaaaggccctagtgtgtttcctctcgcacccagcagtaaaagcacctcagggggtactgctgccctgggctgccttgtgaaagattatttcccggaacctgttactgtgtcttggaatagcggcgctctcacctctggtgttcacacttttccggcagttttgcagtccagcggactttattccctttcatcagtcgtgaccgtcccaagttcctctctgggaacccagacatacatctgcaacgtgaaccacaaaccctctaacactaaggttgataagaaggtggaacctaagagctgcgacaaaacccacacatgtcctccctgtcctgcccctgaactgctgggcgggccttccgtgttcctgtttcctcctaagcctaaggatacactgatgattagcaggacacccgaggtcacctgcgtcgtggtcgacgtctcccacgaggaccctgaagtgaaatttaattggtatgtcgatggagtcgaggtccacaatgccaagaccaaacctagagaggaacaatataattccacatatagagtcgtgtccgtcctcacagtcctccaccaagattggctcaatggcaaagagtataaatgcaaagtgagcaataaggctctgcccgctcccattgaaaaaacaatctccaaagctaagggccaacccagagaaccccaggtgtatacactgcccccctgcagagaagagatgaccaaaaaccaggtcagcctgtggtgtctcgtgaaaggattctatcctagcgacattgccgtggagtgggagtccaatggccagcctgagaataactataagaccaccccccctgtgctggactccgatggatccttcttcctctacagcaagctgacagtggataaaagcagatggcaacagggaaacgtgttcagctgtagcgtcatgcatgaagccctgcacaatcattatacccaaaaaagcctctccctgtctccaggaggtggtggaggaagcggaggtggcggtagtcaggtgcaactggtcgagtccggcggaggcgtcgtgcaacctggcaggagcctcagactctcctgtgctgctagcggctacaccttacctatgagcatgggatggtacaggcaagcacctggaaaagaccgggaaggcgttgctgcaatcgccggcgacgggagaacagactatgctgactcagtcaaggggaggtttaccatttcgcgagataactccaagaatacactgtatctgcaaatgaattcactgcgcgctgaagatactgccgtctactattgcgcccgcggagcggattggaactatggatactggtacttcgacctctggggccaaggaaccctggttacagtcagcagctaatag

SEQ ID NO: 8608 - DNA, 1770 bp, synthetic construct
  source 1..1770: mol_type = other DNA
gaggtgcaactggtagagagcggcgggggcttagtccagcctgggggctccctccggctgtcttgttccgcaagcggattcactttttcatccttcggcatgcactgggtcagacaagctccgggcaaaggacttgaatgggtggcatatatcagctcagggagttccaccatttactacggggacaccgttaaaggcaggttcacgattagtagggataatgccaagaattccctcttcctgcaaatgtctagccttagagccgaggatactgccgtttactactgtgcgcgagaagggggctactactacggacgctcatactacactatggattattggggccaagggacgaccgtaactgtaagctctgcatcaacgaaaggccctagtgtgtttcctctcgcacccagcagtaaaagcacctcagggggtactgctgccctgggctgccttgtgaaagattatttcccggaacctgttactgtgtcttggaatagcggcgctctcacctctggtgttcacacttttccggcagttttgcagtccagcggactttattccctttcatcagtcgtgaccgtcccaagttcctctctgggaacccagacatacatctgcaacgtgaaccacaaaccctctaacactaaggttgataagaaggtggaacctaagagctgcgacaaaacccacacatgtcctccctgtcctgcccctgaactgctgggcgggccttccgtgttcctgtttcctcctaagcctaaggatacactgatgattagcaggacacccgaggtcacctgcgtcgtggtcgacgtctcccacgaggaccctgaagtgaaatttaattggtatgtcgatggagtcgaggtccacaatgccaagaccaaacctagagaggaacaatataattccacatatagagtcgtgtccgtcctcacagtcctccaccaagattggctcaatggcaaagagtataaatgcaaagtgagcaataaggctctgcccgctcccattgaaaaaacaatctccaaagctaagggccaacccagagaaccccaggtgtatacactgcccccctgcagagaagagatgaccaaaaaccaggtcagcctgtggtgtctcgtgaaaggattctatcctagcgacattgccgtggagtgggagtccaatggccagcctgagaataactataagaccaccccccctgtgctggactccgatggatccttcttcctctacagcaagctgacagtggataaaagcagatggcaacagggaaacgtgttcagctgtagcgtcatgcatgaagccctgcacaatcattatacccaaaaaagcctctccctgtctccaggaggtggtggaggaagcggaggtggcggtagtcaggtgcaactggtcgagtccggcggaggcgtcgtgcaacctggcaggagcctcagactctcctgtgctgctagcggcttcccttttggtgggtactcggtgggatggttccgtcaggctccaggcaaggagcgagagggtgttgcagtgatcgatagggacggaagtacaacctatgcagactccgtaaaggggcgattcaccatctcccgggacaatgccaatgacacactttacttacagatgaatagccttcgtgccgaagataccgccgtgtattactgtgctaagagcgccaagtactattacgaggggtcatactactacgtgcatttcgactactggggccaaggaaccctggttacagtcagcagctaatag

SEQ ID NO: 8609 - DNA, 1764 bp, synthetic construct
  source 1..1764: mol_type = other DNA
gaggtgcaactggtagagagcggcgggggcttagtccagcctgggggctccctccggctgtcttgttccgcaagcggattcactttttcatccttcggcatgcactgggtcagacaagctccgggcaaaggacttgaatgggtggcatatatcagctcagggagttccaccatttactacggggacaccgttaaaggcaggttcacgattagtagggataatgccaagaattccctcttcctgcaaatgtctagccttagagccgaggatactgccgtttactactgtgcgcgagaagggggctactactacggacgctcatactacactatggattattggggccaagggacgaccgtaactgtaagctctgcatcaacgaaaggccctagtgtgtttcctctcgcacccagcagtaaaagcacctcagggggtactgctgccctgggctgccttgtgaaagattatttcccggaacctgttactgtgtcttggaatagcggcgctctcacctctggtgttcacacttttccggcagttttgcagtccagcggactttattccctttcatcagtcgtgaccgtcccaagttcctctctgggaacccagacatacatctgcaacgtgaaccacaaaccctctaacactaaggttgataagaaggtggaacctaagagctgcgacaaaacccacacatgtcctccctgtcctgcccctgaactgctgggcgggccttccgtgttcctgtttcctcctaagcctaaggatacactgatgattagcaggacacccgaggtcacctgcgtcgtggtcgacgtctcccacgaggaccctgaagtgaaatttaattggtatgtcgatggagtcgaggtccacaatgccaagaccaaacctagagaggaacaatataattccacatatagagtcgtgtccgtcctcacagtcctccaccaagattggctcaatggcaaagagtataaatgcaaagtgagcaataaggctctgcccgctcccattgaaaaaacaatctccaaagctaagggccaacccagagaaccccaggtgtatacactgcccccctgcagagaagagatgaccaaaaaccaggtcagcctgtggtgtctcgtgaaaggattctatcctagcgacattgccgtggagtgggagtccaatggccagcctgagaataactataagaccaccccccctgtgctggactccgatggatccttcttcctctacagcaagctgacagtggataaaagcagatggcaacagggaaacgtgttcagctgtagcgtcatgcatgaagccctgcacaatcattatacccaaaaaagcctctccctgtctccaggaggtggtggaggaagcggaggtggcggtagtcaggtgcaactggtcgagtccggcggaggcgtcgtgcaacctggcaggagcctcagactctcctgtgctgctagcggcttcaccactactacatacaccatgggatggttccgtcaggctccaggcaagggacgagagttagttgcagtgatcgatagcgacggagacacagcctatgcagagtccgtagaggggcgattcaccatctcccgggacaatgccaaaaggatggtctacttacagatgaatagccttcgtgccgaagataccgccgtgtattactgtgctagagacaaggggggctatggagactaccccttcttcctcttcgattactggggccaaggaaccctggttacagtcagcagctaatag

SEQ ID NO: 8610 - DNA, 1749 bp, synthetic construct
  source 1..1749: mol_type = other DNA
gaggtgcaactggtagagagcggcgggggcttagtccagcctgggggctccctccggctgtcttgttccgcaagcggattcactttttcatccttcggcatgcactgggtcagacaagctccgggcaaaggacttgaatgggtggcatatatcagctcagggagttccaccatttactacggggacaccgttaaaggcaggttcacgattagtagggataatgccaagaattccctcttcctgcaaatgtctagccttagagccgaggatactgccgtttactactgtgcgcgagaagggggctactactacggacgctcatactacactatggattattggggccaagggacgaccgtaactgtaagctctgcatcaacgaaaggccctagtgtgtttcctctcgcacccagcagtaaaagcacctcagggggtactgctgccctgggctgccttgtgaaagattatttcccggaacctgttactgtgtcttggaatagcggcgctctcacctctggtgttcacacttttccggcagttttgcagtccagcggactttattccctttcatcagtcgtgaccgtcccaagttcctctctgggaacccagacatacatctgcaacgtgaaccacaaaccctctaacactaaggttgataagaaggtggaacctaagagctgcgacaaaacccacacatgtcctccctgtcctgcccctgaactgctgggcgggccttccgtgttcctgtttcctcctaagcctaaggatacactgatgattagcaggacacccgaggtcacctgcgtcgtggtcgacgtctcccacgaggaccctgaagtgaaatttaattggtatgtcgatggagtcgaggtccacaatgccaagaccaaacctagagaggaacaatataattccacatatagagtcgtgtccgtcctcacagtcctccaccaagattggctcaatggcaaagagtataaatgcaaagtgagcaataaggctctgcccgctcccattgaaaaaacaatctccaaagctaagggccaacccagagaaccccaggtgtatacactgcccccctgcagagaagagatgaccaaaaaccaggtcagcctgtggtgtctcgtgaaaggattctatcctagcgacattgccgtggagtgggagtccaatggccagcctgagaataactataagaccaccccccctgtgctggactccgatggatccttcttcctctacagcaagctgacagtggataaaagcagatggcaacagggaaacgtgttcagctgtagcgtcatgcatgaagccctgcacaatcattatacccaaaaaagcctctccctgtctccaggaggtggtggaggaagcggaggtggcggtagtcaggtgcaactggtcgagtccggcggaggcgtcgtgcaacctggcaggagcctcagactctcctgtgctgctagcggcttcaccttttctagctacgccatgtcatggttccgtcaggctccaggcaagggacgagagttagttgcagccatcgatagcgacggaagtacatcctatgcagactccgtagaggggcgattcaccatctcccgggacaatgccaaaaggatggtctacttacagatgaatagccttcgtgccgaagataccgccgtgtattactgtgctagagtggatttctactattactacatggacgtgtggggccaaggaaccctggttacagtcagcagctaatag

SEQ ID NO: 8611 - DNA, 1743 bp, synthetic construct
  source 1..1743: mol_type = other DNA
gaggtgcaactggtagagagcggcgggggcttagtccagcctgggggctccctccggctgtcttgttccgcaagcggattcactttttcatccttcggcatgcactgggtcagacaagctccgggcaaaggacttgaatgggtggcatatatcagctcagggagttccaccatttactacggggacaccgttaaaggcaggttcacgattagtagggataatgccaagaattccctcttcctgcaaatgtctagccttagagccgaggatactgccgtttactactgtgcgcgagaagggggctactactacggacgctcatactacactatggattattggggccaagggacgaccgtaactgtaagctctgcatcaacgaaaggccctagtgtgtttcctctcgcacccagcagtaaaagcacctcagggggtactgctgccctgggctgccttgtgaaagattatttcccggaacctgttactgtgtcttggaatagcggcgctctcacctctggtgttcacacttttccggcagttttgcagtccagcggactttattccctttcatcagtcgtgaccgtcccaagttcctctctgggaacccagacatacatctgcaacgtgaaccacaaaccctctaacactaaggttgataagaaggtggaacctaagagctgcgacaaaacccacacatgtcctccctgtcctgcccctgaactgctgggcgggccttccgtgttcctgtttcctcctaagcctaaggatacactgatgattagcaggacacccgaggtcacctgcgtcgtggtcgacgtctcccacgaggaccctgaagtgaaatttaattggtatgtcgatggagtcgaggtccacaatgccaagaccaaacctagagaggaacaatataattccacatatagagtcgtgtccgtcctcacagtcctccaccaagattggctcaatggcaaagagtataaatgcaaagtgagcaataaggctctgcccgctcccattgaaaaaacaatctccaaagctaagggccaacccagagaaccccaggtgtatacactgcccccctgcagagaagagatgaccaaaaaccaggtcagcctgtggtgtctcgtgaaaggattctatcctagcgacattgccgtggagtgggagtccaatggccagcctgagaataactataagaccaccccccctgtgctggactccgatggatccttcttcctctacagcaagctgacagtggataaaagcagatggcaacagggaaacgtgttcagctgtagcgtcatgcatgaagccctgcacaatcattatacccaaaaaagcctctccctgtctccaggaggtggtggaggaagcggaggtggcggtagtcaggtgcaactggtcgagtccggcggaggcgtcgtgcaacctggcaggagcctcagactctcctgtgctgctagcggcgccacctctaatacatactacatgggatggttccgtcaggctccaggcaaggagcgagagggtgttgcaacaatccggagggacgacctgacagcctatacagactccgtaaaggggcgattcaccatctcccgggacaatacaaaaaacacactttacttacagatgaatagccttcgtgccgaagataccgccgtgtattactgtgctagactggatagcaacggctacagctactggggccaaggaaccctggttacagtcagcagctaatag

SEQ ID NO: 8612 - DNA, 1752 bp, synthetic construct
  source 1..1752: mol_type = other DNA
gaggtgcaactggtagagagcggcgggggcttagtccagcctgggggctccctccggctgtcttgttccgcaagcggattcactttttcatccttcggcatgcactgggtcagacaagctccgggcaaaggacttgaatgggtggcatatatcagctcagggagttccaccatttactacggggacaccgttaaaggcaggttcacgattagtagggataatgccaagaattccctcttcctgcaaatgtctagccttagagccgaggatactgccgtttactactgtgcgcgagaagggggctactactacggacgctcatactacactatggattattggggccaagggacgaccgtaactgtaagctctgcatcaacgaaaggccctagtgtgtttcctctcgcacccagcagtaaaagcacctcagggggtactgctgccctgggctgccttgtgaaagattatttcccggaacctgttactgtgtcttggaatagcggcgctctcacctctggtgttcacacttttccggcagttttgcagtccagcggactttattccctttcatcagtcgtgaccgtcccaagttcctctctgggaacccagacatacatctgcaacgtgaaccacaaaccctctaacactaaggttgataagaaggtggaacctaagagctgcgacaaaacccacacatgtcctccctgtcctgcccctgaactgctgggcgggccttccgtgttcctgtttcctcctaagcctaaggatacactgatgattagcaggacacccgaggtcacctgcgtcgtggtcgacgtctcccacgaggaccctgaagtgaaatttaattggtatgtcgatggagtcgaggtccacaatgccaagaccaaacctagagaggaacaatataattccacatatagagtcgtgtccgtcctcacagtcctccaccaagattggctcaatggcaaagagtataaatgcaaagtgagcaataaggctctgcccgctcccattgaaaaaacaatctccaaagctaagggccaacccagagaaccccaggtgtatacactgcccccctgcagagaagagatgaccaaaaaccaggtcagcctgtggtgtctcgtgaaaggattctatcctagcgacattgccgtggagtgggagtccaatggccagcctgagaataactataagaccaccccccctgtgctggactccgatggatccttcttcctctacagcaagctgacagtggataaaagcagatggcaacagggaaacgtgttcagctgtagcgtcatgcatgaagccctgcacaatcattatacccaaaaaagcctctccctgtctccaggaggtggtggaggaagcggaggtggcggtagtcaggtgcaactggtcgagtccggcggaggcgtcgtgcaacctggcaggagcctcagactctcctgtgctgctagcggcagatccaatgaaaactacttcctggcctggtaccgtcaggctccaggcaaggaccgagagggtgttgcagtgatctatagcgacggaaagacagtctatgcagactccgtaaaggggcgattcaccatctcccgggacaatagtaaaaacacactttacttacagatgaatagccttcgtgccgaagataccgccgtgtattactgtactgagtacggcttcaagaatggatacgcgttcgacgcctggggccaaggaaccctggttacagtcagcagctaatag

SEQ ID NO: 8613 - DNA, 1746 bp, synthetic construct
  source 1..1746: mol_type = other DNA
gaggtgcaactggtagagagcggcgggggcttagtccagcctgggggctccctccggctgtcttgttccgcaagcggattcactttttcatccttcggcatgcactgggtcagacaagctccgggcaaaggacttgaatgggtggcatatatcagctcagggagttccaccatttactacggggacaccgttaaaggcaggttcacgattagtagggataatgccaagaattccctcttcctgcaaatgtctagccttagagccgaggatactgccgtttactactgtgcgcgagaagggggctactactacggacgctcatactacactatggattattggggccaagggacgaccgtaactgtaagctctgcatcaacgaaaggccctagtgtgtttcctctcgcacccagcagtaaaagcacctcagggggtactgctgccctgggctgccttgtgaaagattatttcccggaacctgttactgtgtcttggaatagcggcgctctcacctctggtgttcacacttttccggcagttttgcagtccagcggactttattccctttcatcagtcgtgaccgtcccaagttcctctctgggaacccagacatacatctgcaacgtgaaccacaaaccctctaacactaaggttgataagaaggtggaacctaagagctgcgacaaaacccacacatgtcctccctgtcctgcccctgaactgctgggcgggccttccgtgttcctgtttcctcctaagcctaaggatacactgatgattagcaggacacccgaggtcacctgcgtcgtggtcgacgtctcccacgaggaccctgaagtgaaatttaattggtatgtcgatggagtcgaggtccacaatgccaagaccaaacctagagaggaacaatataattccacatatagagtcgtgtccgtcctcacagtcctccaccaagattggctcaatggcaaagagtataaatgcaaagtgagcaataaggctctgcccgctcccattgaaaaaacaatctccaaagctaagggccaacccagagaaccccaggtgtatacactgcccccctgcagagaagagatgaccaaaaaccaggtcagcctgtggtgtctcgtgaaaggattctatcctagcgacattgccgtggagtgggagtccaatggccagcctgagaataactataagaccaccccccctgtgctggactccgatggatccttcttcctctacagcaagctgacagtggataaaagcagatggcaacagggaaacgtgttcagctgtagcgtcatgcatgaagccctgcacaatcattatacccaaaaaagcctctccctgtctccaggaggtggtggaggaagcggaggtggcggtagtcaggtgcaactggtcgagtccggcggaggcgtcgtgcaacctggcaggagcctcagactctcctgtgctgctagcggcgccacctctaatacatactacatgggatggttccgtctggctccaggcaaggagcgagagggtgttgcaagtatctatacgcaggacggaagaaccgcttacgccgattcagtgaagggccggtttaccatttccgaggataacgctaagaacactgtgtatcttcaaatgaactccttacgggctgaagacaccgcagtctactattgtgccaggatcgacatcgatggatacgcgtactggggccaaggaaccctggttacagtcagcagctaatag

SEQ ID NO: 8614 - DNA, 1749 bp, synthetic construct
  source 1..1749: mol_type = other DNA
gaggtgcaactggtagagagcggcgggggcttagtccagcctgggggctccctccggctgtcttgttccgcaagcggattcactttttcatccttcggcatgcactgggtcagacaagctccgggcaaaggacttgaatgggtggcatatatcagctcagggagttccaccatttactacggggacaccgttaaaggcaggttcacgattagtagggataatgccaagaattccctcttcctgcaaatgtctagccttagagccgaggatactgccgtttactactgtgcgcgagaagggggctactactacggacgctcatactacactatggattattggggccaagggacgaccgtaactgtaagctctgcatcaacgaaaggccctagtgtgtttcctctcgcacccagcagtaaaagcacctcagggggtactgctgccctgggctgccttgtgaaagattatttcccggaacctgttactgtgtcttggaatagcggcgctctcacctctggtgttcacacttttccggcagttttgcagtccagcggactttattccctttcatcagtcgtgaccgtcccaagttcctctctgggaacccagacatacatctgcaacgtgaaccacaaaccctctaacactaaggttgataagaaggtggaacctaagagctgcgacaaaacccacacatgtcctccctgtcctgcccctgaactgctgggcgggccttccgtgttcctgtttcctcctaagcctaaggatacactgatgattagcaggacacccgaggtcacctgcgtcgtggtcgacgtctcccacgaggaccctgaagtgaaatttaattggtatgtcgatggagtcgaggtccacaatgccaagaccaaacctagagaggaacaatataattccacatatagagtcgtgtccgtcctcacagtcctccaccaagattggctcaatggcaaagagtataaatgcaaagtgagcaataaggctctgcccgctcccattgaaaaaacaatctccaaagctaagggccaacccagagaaccccaggtgtatacactgcccccctgcagagaagagatgaccaaaaaccaggtcagcctgtggtgtctcgtgaaaggattctatcctagcgacattgccgtggagtgggagtccaatggccagcctgagaataactataagaccaccccccctgtgctggactccgatggatccttcttcctctacagcaagctgacagtggataaaagcagatggcaacagggaaacgtgttcagctgtagcgtcatgcatgaagccctgcacaatcattatacccaaaaaagcctctccctgtctccaggaggtggtggaggaagcggaggtggcggtagtcaggtgcaactggtcgagtccggcggaggcgtcgtgcaacctggcaggagcctcagactctcctgtgctgctagcggcagttccgatgaaatctacgccatggcctggttccgtcaggctccaggcaagggacgagagttagttgcagccatcgaaaacgacggaacaacaacctatgcacactccgtaaaggggcgattcaccatctccgccgacactagtaaaaacacagcttacttacagatgaatagccttcgtgccgaagataccgccgtgtattactgtgctagagactcaacgtcatggtggtacttcgacctgtggggccaaggaaccctggttacagtcagcagctaatag

SEQ ID NO: 8615 - DNA, 1746 bp, synthetic construct
  source 1..1746: mol_type = other DNA
gaggtgcaactggtagagagcggcgggggcttagtccagcctgggggctccctccggctgtcttgttccgcaagcggattcactttttcatccttcggcatgcactgggtcagacaagctccgggcaaaggacttgaatgggtggcatatatcagctcagggagttccaccatttactacggggacaccgttaaaggcaggttcacgattagtagggataatgccaagaattccctcttcctgcaaatgtctagccttagagccgaggatactgccgtttactactgtgcgcgagaagggggctactactacggacgctcatactacactatggattattggggccaagggacgaccgtaactgtaagctctgcatcaacgaaaggccctagtgtgtttcctctcgcacccagcagtaaaagcacctcagggggtactgctgccctgggctgccttgtgaaagattatttcccggaacctgttactgtgtcttggaatagcggcgctctcacctctggtgttcacacttttccggcagttttgcagtccagcggactttattccctttcatcagtcgtgaccgtcccaagttcctctctgggaacccagacatacatctgcaacgtgaaccacaaaccctctaacactaaggttgataagaaggtggaacctaagagctgcgacaaaacccacacatgtcctccctgtcctgcccctgaactgctgggcgggccttccgtgttcctgtttcctcctaagcctaaggatacactgatgattagcaggacacccgaggtcacctgcgtcgtggtcgacgtctcccacgaggaccctgaagtgaaatttaattggtatgtcgatggagtcgaggtccacaatgccaagaccaaacctagagaggaacaatataattccacatatagagtcgtgtccgtcctcacagtcctccaccaagattggctcaatggcaaagagtataaatgcaaagtgagcaataaggctctgcccgctcccattgaaaaaacaatctccaaagctaagggccaacccagagaaccccaggtgtatacactgcccccctgcagagaagagatgaccaaaaaccaggtcagcctgtggtgtctcgtgaaaggattctatcctagcgacattgccgtggagtgggagtccaatggccagcctgagaataactataagaccaccccccctgtgctggactccgatggatccttcttcctctacagcaagctgacagtggataaaagcagatggcaacagggaaacgtgttcagctgtagcgtcatgcatgaagccctgcacaatcattatacccaaaaaagcctctccctgtctccaggaggtggtggaggaagcggaggtggcggtagtcaggtgcaactggtcgagtccggcggaggcgtcgtgcaacctggcaggagcctcagactctcctgtgctgctagcggcccatccgcttctgcaaaggccatggcctggttccgtcagtctgtgggcaaggagcgagagggtattgcagccatccggcacgacggaggagagacctggtacgccgcctcagtgaagggccggtttaccatttccagggataacgctaagaacactctgtatcttcaaatgaactccttacgggctgaagacaccgcagtctactattgtgtgagggatcacggcggcgccagggacatctggggccaaggaaccctggttacagtcagcagctaatag

SEQ ID NO: 8616 - DNA, 1749 bp, synthetic construct
  source 1..1749: mol_type = other DNA
gaggtgcaactggtagagagcggcgggggcttagtccagcctgggggctccctccggctgtcttgttccgcaagcggattcactttttcatccttcggcatgcactgggtcagacaagctccgggcaaaggacttgaatgggtggcatatatcagctcagggagttccaccatttactacggggacaccgttaaaggcaggttcacgattagtagggataatgccaagaattccctcttcctgcaaatgtctagccttagagccgaggatactgccgtttactactgtgcgcgagaagggggctactactacggacgctcatactacactatggattattggggccaagggacgaccgtaactgtaagctctgcatcaacgaaaggccctagtgtgtttcctctcgcacccagcagtaaaagcacctcagggggtactgctgccctgggctgccttgtgaaagattatttcccggaacctgttactgtgtcttggaatagcggcgctctcacctctggtgttcacacttttccggcagttttgcagtccagcggactttattccctttcatcagtcgtgaccgtcccaagttcctctctgggaacccagacatacatctgcaacgtgaaccacaaaccctctaacactaaggttgataagaaggtggaacctaagagctgcgacaaaacccacacatgtcctccctgtcctgcccctgaactgctgggcgggccttccgtgttcctgtttcctcctaagcctaaggatacactgatgattagcaggacacccgaggtcacctgcgtcgtggtcgacgtctcccacgaggaccctgaagtgaaatttaattggtatgtcgatggagtcgaggtccacaatgccaagaccaaacctagagaggaacaatataattccacatatagagtcgtgtccgtcctcacagtcctccaccaagattggctcaatggcaaagagtataaatgcaaagtgagcaataaggctctgcccgctcccattgaaaaaacaatctccaaagctaagggccaacccagagaaccccaggtgtatacactgcccccctgcagagaagagatgaccaaaaaccaggtcagcctgtggtgtctcgtgaaaggattctatcctagcgacattgccgtggagtgggagtccaatggccagcctgagaataactataagaccaccccccctgtgctggactccgatggatccttcttcctctacagcaagctgacagtggataaaagcagatggcaacagggaaacgtgttcagctgtagcgtcatgcatgaagccctgcacaatcattatacccaaaaaagcctctccctgtctccaggaggtggtggaggaagcggaggtggcggtagtcaggtgcaactggtcgagtccggcggaggcgtcgtgcaacctggcaggagcctcagactctcctgtgctgctagcggcctgtccgtttctgacagctcgatggcctggttccgtcagcgtccaggccaggagcgagagggtattgcagccatcgatacgggggacggaagtacctattacctcaattcagtggagggccggtttaccatttcccacgataacgctaagaacactctgtatcttcaaatgaactccttacgggctgaagacaccgcagtctactattgtgtgaggcagcagcgggatggactggtgaatttctggggccaaggaaccctggttacagtcagcagctaatag

SEQ ID NO: 8617 - DNA, 1752 bp, synthetic construct
  source 1..1752: mol_type = other DNA
gaggtgcaactggtagagagcggcgggggcttagtccagcctgggggctccctccggctgtcttgttccgcaagcggattcactttttcatccttcggcatgcactgggtcagacaagctccgggcaaaggacttgaatgggtggcatatatcagctcagggagttccaccatttactacggggacaccgttaaaggcaggttcacgattagtagggataatgccaagaattccctcttcctgcaaatgtctagccttagagccgaggatactgccgtttactactgtgcgcgagaagggggctactactacggacgctcatactacactatggattattggggccaagggacgaccgtaactgtaagctctgcatcaacgaaaggccctagtgtgtttcctctcgcacccagcagtaaaagcacctcagggggtactgctgccctgggctgccttgtgaaagattatttcccggaacctgttactgtgtcttggaatagcggcgctctcacctctggtgttcacacttttccggcagttttgcagtccagcggactttattccctttcatcagtcgtgaccgtcccaagttcctctctgggaacccagacatacatctgcaacgtgaaccacaaaccctctaacactaaggttgataagaaggtggaacctaagagctgcgacaaaacccacacatgtcctccctgtcctgcccctgaactgctgggcgggccttccgtgttcctgtttcctcctaagcctaaggatacactgatgattagcaggacacccgaggtcacctgcgtcgtggtcgacgtctcccacgaggaccctgaagtgaaatttaattggtatgtcgatggagtcgaggtccacaatgccaagaccaaacctagagaggaacaatataattccacatatagagtcgtgtccgtcctcacagtcctccaccaagattggctcaatggcaaagagtataaatgcaaagtgagcaataaggctctgcccgctcccattgaaaaaacaatctccaaagctaagggccaacccagagaaccccaggtgtatacactgcccccctgcagagaagagatgaccaaaaaccaggtcagcctgtggtgtctcgtgaaaggattctatcctagcgacattgccgtggagtgggagtccaatggccagcctgagaataactataagaccaccccccctgtgctggactccgatggatccttcttcctctacagcaagctgacagtggataaaagcagatggcaacagggaaacgtgttcagctgtagcgtcatgcatgaagccctgcacaatcattatacccaaaaaagcctctccctgtctccaggaggtggtggaggaagcggaggtggcggtagtcaggtgcaactggtcgagtccggcggaggcgtcgtgcaacctggcaggagcctcagactctcctgtgctgctagcggcttcaccgttggtgcaagggccatggcctggtaccgtcaggctccaggcaaggaccgagagggtgttgcagccatcgatagcgacggaatcgcatcctatgcagactccgtaaaggggcgattcaccatctcccgggacaatgccaaaaacacactttacttacagatgaatagccttcgtgccgaagataccgccgtgtattactgtgctagagtgtcagggtcatatggagactacttcgactactggggccaaggaaccctggttacagtcagcagctaatag

SEQ ID NO: 8618 - DNA, 1743 bp, synthetic construct
  source 1..1743: mol_type = other DNA
gaggtgcaactggtagagagcggcgggggcttagtccagcctgggggctccctccggctgtcttgttccgcaagcggattcactttttcatccttcggcatgcactgggtcagacaagctccgggcaaaggacttgaatgggtggcatatatcagctcagggagttccaccatttactacggggacaccgttaaaggcaggttcacgattagtagggataatgccaagaattccctcttcctgcaaatgtctagccttagagccgaggatactgccgtttactactgtgcgcgagaagggggctactactacggacgctcatactacactatggattattggggccaagggacgaccgtaactgtaagctctgcatcaacgaaaggccctagtgtgtttcctctcgcacccagcagtaaaagcacctcagggggtactgctgccctgggctgccttgtgaaagattatttcccggaacctgttactgtgtcttggaatagcggcgctctcacctctggtgttcacacttttccggcagttttgcagtccagcggactttattccctttcatcagtcgtgaccgtcccaagttcctctctgggaacccagacatacatctgcaacgtgaaccacaaaccctctaacactaaggttgataagaaggtggaacctaagagctgcgacaaaacccacacatgtcctccctgtcctgcccctgaactgctgggcgggccttccgtgttcctgtttcctcctaagcctaaggatacactgatgattagcaggacacccgaggtcacctgcgtcgtggtcgacgtctcccacgaggaccctgaagtgaaatttaattggtatgtcgatggagtcgaggtccacaatgccaagaccaaacctagagaggaacaatataattccacatatagagtcgtgtccgtcctcacagtcctccaccaagattggctcaatggcaaagagtataaatgcaaagtgagcaataaggctctgcccgctcccattgaaaaaacaatctccaaagctaagggccaacccagagaaccccaggtgtatacactgcccccctgcagagaagagatgaccaaaaaccaggtcagcctgtggtgtctcgtgaaaggattctatcctagcgacattgccgtggagtgggagtccaatggccagcctgagaataactataagaccaccccccctgtgctggactccgatggatccttcttcctctacagcaagctgacagtggataaaagcagatggcaacagggaaacgtgttcagctgtagcgtcatgcatgaagccctgcacaatcattatacccaaaaaagcctctccctgtctccaggaggtggtggaggaagcggaggtggcggtagtcaggtgcaactggtcgagtccggcggaggcgtcgtgcaacctggcaggagcctcagactctcctgtgctgctagcggctacacctttgatgagagcgacatgggatggttccgtcaggctccaggcaagggacgagagttagttagtacaatctccccggacggaacaacatattatgcagactccgtagaggggcgattcaccatctcccgggacaatgccaaaaggatggtctacttacagatgaatagccttcgtgccgaagataccgccgtgtattactgtgctagatggcggaggtcatggttcgacacgtggggccaaggaaccctggttacagtcagcagctaatag

SEQ ID NO: 8619 - DNA, 1749 bp, synthetic construct
  source 1..1749: mol_type = other DNA
gaggtgcaactggtagagagcggcgggggcttagtccagcctgggggctccctccggctgtcttgttccgcaagcggattcactttttcatccttcggcatgcactgggtcagacaagctccgggcaaaggacttgaatgggtggcatatatcagctcagggagttccaccatttactacggggacaccgttaaaggcaggttcacgattagtagggataatgccaagaattccctcttcctgcaaatgtctagccttagagccgaggatactgccgtttactactgtgcgcgagaagggggctactactacggacgctcatactacactatggattattggggccaagggacgaccgtaactgtaagctctgcatcaacgaaaggccctagtgtgtttcctctcgcacccagcagtaaaagcacctcagggggtactgctgccctgggctgccttgtgaaagattatttcccggaacctgttactgtgtcttggaatagcggcgctctcacctctggtgttcacacttttccggcagttttgcagtccagcggactttattccctttcatcagtcgtgaccgtcccaagttcctctctgggaacccagacatacatctgcaacgtgaaccacaaaccctctaacactaaggttgataagaaggtggaacctaagagctgcgacaaaacccacacatgtcctccctgtcctgcccctgaactgctgggcgggccttccgtgttcctgtttcctcctaagcctaaggatacactgatgattagcaggacacccgaggtcacctgcgtcgtggtcgacgtctcccacgaggaccctgaagtgaaatttaattggtatgtcgatggagtcgaggtccacaatgccaagaccaaacctagagaggaacaatataattccacatatagagtcgtgtccgtcctcacagtcctccaccaagattggctcaatggcaaagagtataaatgcaaagtgagcaataaggctctgcccgctcccattgaaaaaacaatctccaaagctaagggccaacccagagaaccccaggtgtatacactgcccccctgcagagaagagatgaccaaaaaccaggtcagcctgtggtgtctcgtgaaaggattctatcctagcgacattgccgtggagtgggagtccaatggccagcctgagaataactataagaccaccccccctgtgctggactccgatggatccttcttcctctacagcaagctgacagtggataaaagcagatggcaacagggaaacgtgttcagctgtagcgtcatgcatgaagccctgcacaatcattatacccaaaaaagcctctccctgtctccaggaggtggtggaggaagcggaggtggcggtagtcaggtgcaactggtcgagtccggcggaggcgtcgtgcaacctggcaggagcctcagactctcctgtgctgctagcggctacaccgttgctacatacttcatcggatggttccgtcaggctccaggcaaggcccgagagggtgttgcaacaatcaccagcgacggaagaacaaaatatgcagactccgtaaaggggcgattcaccatctcccgggacaatgccaaaaacacagtctacttacagatgaatagccttcgtgccgaagataccgccgtgtattactgtgctagtaggtcaatagccgccgccggggagggctactggggccaaggaaccctggttacagtcagcagctaatag

SEQ ID NO: 8620 - DNA, 1743 bp, synthetic construct
  source 1..1743: mol_type = other DNA
gaggtgcaactggtagagagcggcgggggcttagtccagcctgggggctccctccggctgtcttgttccgcaagcggattcactttttcatccttcggcatgcactgggtcagacaagctccgggcaaaggacttgaatgggtggcatatatcagctcagggagttccaccatttactacggggacaccgttaaaggcaggttcacgattagtagggataatgccaagaattccctcttcctgcaaatgtctagccttagagccgaggatactgccgtttactactgtgcgcgagaagggggctactactacggacgctcatactacactatggattattggggccaagggacgaccgtaactgtaagctctgcatcaacgaaaggccctagtgtgtttcctctcgcacccagcagtaaaagcacctcagggggtactgctgccctgggctgccttgtgaaagattatttcccggaacctgttactgtgtcttggaatagcggcgctctcacctctggtgttcacacttttccggcagttttgcagtccagcggactttattccctttcatcagtcgtgaccgtcccaagttcctctctgggaacccagacatacatctgcaacgtgaaccacaaaccctctaacactaaggttgataagaaggtggaacctaagagctgcgacaaaacccacacatgtcctccctgtcctgcccctgaactgctgggcgggccttccgtgttcctgtttcctcctaagcctaaggatacactgatgattagcaggacacccgaggtcacctgcgtcgtggtcgacgtctcccacgaggaccctgaagtgaaatttaattggtatgtcgatggagtcgaggtccacaatgccaagaccaaacctagagaggaacaatataattccacatatagagtcgtgtccgtcctcacagtcctccaccaagattggctcaatggcaaagagtataaatgcaaagtgagcaataaggctctgcccgctcccattgaaaaaacaatctccaaagctaagggccaacccagagaaccccaggtgtatacactgcccccctgcagagaagagatgaccaaaaaccaggtcagcctgtggtgtctcgtgaaaggattctatcctagcgacattgccgtggagtgggagtccaatggccagcctgagaataactataagaccaccccccctgtgctggactccgatggatccttcttcctctacagcaagctgacagtggataaaagcagatggcaacagggaaacgtgttcagctgtagcgtcatgcatgaagccctgcacaatcattatacccaaaaaagcctctccctgtctccaggaggtggtggaggaagcggaggtggcggtagtcaggtgcaactggtcgagtccggcggaggcgtcgtgcaacctggcaggagcctcagactctcctgtgctgctagcggctacccttcttgtatggggtgggcacggcaggcacctgggaaaggattggagtgggtcgcctgtattgagagaagaggcaggatacactacgcagcctctgtgaagggccggttcacgatttcgcgagacaattccaagaatacattgtacctgcaaatgaattccttgcgggcagaagataccgctgtttactattgcgctagccaggatagtagctcatacgacgccttcgacatatggggccaaggaaccctggttacagtcagcagctaatag

SEQ ID NO: 8621 - DNA, 1746 bp, synthetic construct
  source 1..1746: mol_type = other DNA
gaggtgcaactggtagagagcggcgggggcttagtccagcctgggggctccctccggctgtcttgttccgcaagcggattcactttttcatccttcggcatgcactgggtcagacaagctccgggcaaaggacttgaatgggtggcatatatcagctcagggagttccaccatttactacggggacaccgttaaaggcaggttcacgattagtagggataatgccaagaattccctcttcctgcaaatgtctagccttagagccgaggatactgccgtttactactgtgcgcgagaagggggctactactacggacgctcatactacactatggattattggggccaagggacgaccgtaactgtaagctctgcatcaacgaaaggccctagtgtgtttcctctcgcacccagcagtaaaagcacctcagggggtactgctgccctgggctgccttgtgaaagattatttcccggaacctgttactgtgtcttggaatagcggcgctctcacctctggtgttcacacttttccggcagttttgcagtccagcggactttattccctttcatcagtcgtgaccgtcccaagttcctctctgggaacccagacatacatctgcaacgtgaaccacaaaccctctaacactaaggttgataagaaggtggaacctaagagctgcgacaaaacccacacatgtcctccctgtcctgcccctgaactgctgggcgggccttccgtgttcctgtttcctcctaagcctaaggatacactgatgattagcaggacacccgaggtcacctgcgtcgtggtcgacgtctcccacgaggaccctgaagtgaaatttaattggtatgtcgatggagtcgaggtccacaatgccaagaccaaacctagagaggaacaatataattccacatatagagtcgtgtccgtcctcacagtcctccaccaagattggctcaatggcaaagagtataaatgcaaagtgagcaataaggctctgcccgctcccattgaaaaaacaatctccaaagctaagggccaacccagagaaccccaggtgtatacactgcccccctgcagagaagagatgaccaaaaaccaggtcagcctgtggtgtctcgtgaaaggattctatcctagcgacattgccgtggagtgggagtccaatggccagcctgagaataactataagaccaccccccctgtgctggactccgatggatccttcttcctctacagcaagctgacagtggataaaagcagatggcaacagggaaacgtgttcagctgtagcgtcatgcatgaagccctgcacaatcattatacccaaaaaagcctctccctgtctccaggaggtggtggaggaagcggaggtggcggtagtcaggtgcaactggtcgagtccggcggaggcgtcgtgcaacctggcaggagcctcagactctcctgtgctgctagcggcggagcctatcgtaagtactacatgggatggttccgtcaggctccaggcaagggacgagagttagttgcagccatcgaaagcgacggaacaacagattatgcagactccgtagaggggcgattcaccatctcccgggacaatgccaaaaggatggtctacttacagatgaatagccttcgtgccgaagataccgccgtgtattactgtgctagtgtgatcgggggcaatagtgaggactactggggccaaggaaccctggttacagtcagcagctaatag

SEQ ID NO: 8622 - DNA, 1770 bp, synthetic construct
  source 1..1770: mol_type = other DNA
gaggtgcaactggtagagagcggcgggggcttagtccagcctgggggctccctccggctgtcttgttccgcaagcggattcactttttcatccttcggcatgcactgggtcagacaagctccgggcaaaggacttgaatgggtggcatatatcagctcagggagttccaccatttactacggggacaccgttaaaggcaggttcacgattagtagggataatgccaagaattccctcttcctgcaaatgtctagccttagagccgaggatactgccgtttactactgtgcgcgagaagggggctactactacggacgctcatactacactatggattattggggccaagggacgaccgtaactgtaagctctgcatcaacgaaaggccctagtgtgtttcctctcgcacccagcagtaaaagcacctcagggggtactgctgccctgggctgccttgtgaaagattatttcccggaacctgttactgtgtcttggaatagcggcgctctcacctctggtgttcacacttttccggcagttttgcagtccagcggactttattccctttcatcagtcgtgaccgtcccaagttcctctctgggaacccagacatacatctgcaacgtgaaccacaaaccctctaacactaaggttgataagaaggtggaacctaagagctgcgacaaaacccacacatgtcctccctgtcctgcccctgaactgctgggcgggccttccgtgttcctgtttcctcctaagcctaaggatacactgatgattagcaggacacccgaggtcacctgcgtcgtggtcgacgtctcccacgaggaccctgaagtgaaatttaattggtatgtcgatggagtcgaggtccacaatgccaagaccaaacctagagaggaacaatataattccacatatagagtcgtgtccgtcctcacagtcctccaccaagattggctcaatggcaaagagtataaatgcaaagtgagcaataaggctctgcccgctcccattgaaaaaacaatctccaaagctaagggccaacccagagaaccccaggtgtatacactgcccccctgcagagaagagatgaccaaaaaccaggtcagcctgtggtgtctcgtgaaaggattctatcctagcgacattgccgtggagtgggagtccaatggccagcctgagaataactataagaccaccccccctgtgctggactccgatggatccttcttcctctacagcaagctgacagtggataaaagcagatggcaacagggaaacgtgttcagctgtagcgtcatgcatgaagccctgcacaatcattatacccaaaaaagcctctccctgtctccaggaggtggtggaggaagcggaggtggcggtagtcaggtgcaactggtcgagtccggcggaggcgtcgtgcaacctggcaggagcctcagactctcctgtgctgctagcggcgacgccaatgaattcgagtggatcggatggtaccgtcaggctccaggcaagggacgagagttagttgcaagaatcggcagcagcggaccaagatatgctgactcagtcgaggggaggtttaccatttcgcgagataactccaagaatacactgtatctgcaaatgaattcactgcgcgctgaagatactgccgtctactattgcgccgctacacactgtagcttcctcacaacgagcgtagcaggctgcacagatgacaagtactggggccaaggaaccctggttacagtcagcagctaatag

SEQ ID NO: 8623 - DNA, 1752 bp, synthetic construct
  source 1..1752: mol_type = other DNA
gaggtgcaactggtagagagcggcgggggcttagtccagcctgggggctccctccggctgtcttgttccgcaagcggattcactttttcatccttcggcatgcactgggtcagacaagctccgggcaaaggacttgaatgggtggcatatatcagctcagggagttccaccatttactacggggacaccgttaaaggcaggttcacgattagtagggataatgccaagaattccctcttcctgcaaatgtctagccttagagccgaggatactgccgtttactactgtgcgcgagaagggggctactactacggacgctcatactacactatggattattggggccaagggacgaccgtaactgtaagctctgcatcaacgaaaggccctagtgtgtttcctctcgcacccagcagtaaaagcacctcagggggtactgctgccctgggctgccttgtgaaagattatttcccggaacctgttactgtgtcttggaatagcggcgctctcacctctggtgttcacacttttccggcagttttgcagtccagcggactttattccctttcatcagtcgtgaccgtcccaagttcctctctgggaacccagacatacatctgcaacgtgaaccacaaaccctctaacactaaggttgataagaaggtggaacctaagagctgcgacaaaacccacacatgtcctccctgtcctgcccctgaactgctgggcgggccttccgtgttcctgtttcctcctaagcctaaggatacactgatgattagcaggacacccgaggtcacctgcgtcgtggtcgacgtctcccacgaggaccctgaagtgaaatttaattggtatgtcgatggagtcgaggtccacaatgccaagaccaaacctagagaggaacaatataattccacatatagagtcgtgtccgtcctcacagtcctccaccaagattggctcaatggcaaagagtataaatgcaaagtgagcaataaggctctgcccgctcccattgaaaaaacaatctccaaagctaagggccaacccagagaaccccaggtgtatacactgcccccctgcagagaagagatgaccaaaaaccaggtcagcctgtggtgtctcgtgaaaggattctatcctagcgacattgccgtggagtgggagtccaatggccagcctgagaataactataagaccaccccccctgtgctggactccgatggatccttcttcctctacagcaagctgacagtggataaaagcagatggcaacagggaaacgtgttcagctgtagcgtcatgcatgaagccctgcacaatcattatacccaaaaaagcctctccctgtctccaggaggtggtggaggaagcggaggtggcggtagtcaggtgcaactggtcgagtccggcggaggcgtcgtgcaacctggcaggagcctcagactctcctgtgctgctagcggcttcaccttaggtacaaactgcatggcctggttccgtcaggctccaggcaaggagcgagagcgtgttgcaagtatcggcagcgacggaagaacatattatgcagactccgtaaaggggcgattcaccatctcccgggacaatagtaaaaacacactttacttacagatgaatagccttcgtgccgaagataccgccgtgtattactgtgctagagcgcccgggatccagctgtggaagttcgactactggggccaaggaaccctggttacagtcagcagctaatag

SEQ ID NO: 8624 - DNA, 1752 bp, synthetic construct
  source 1..1752: mol_type = other DNA
gaggtgcaactggtagagagcggcgggggcttagtccagcctgggggctccctccggctgtcttgttccgcaagcggattcactttttcatccttcggcatgcactgggtcagacaagctccgggcaaaggacttgaatgggtggcatatatcagctcagggagttccaccatttactacggggacaccgttaaaggcaggttcacgattagtagggataatgccaagaattccctcttcctgcaaatgtctagccttagagccgaggatactgccgtttactactgtgcgcgagaagggggctactactacggacgctcatactacactatggattattggggccaagggacgaccgtaactgtaagctctgcatcaacgaaaggccctagtgtgtttcctctcgcacccagcagtaaaagcacctcagggggtactgctgccctgggctgccttgtgaaagattatttcccggaacctgttactgtgtcttggaatagcggcgctctcacctctggtgttcacacttttccggcagttttgcagtccagcggactttattccctttcatcagtcgtgaccgtcccaagttcctctctgggaacccagacatacatctgcaacgtgaaccacaaaccctctaacactaaggttgataagaaggtggaacctaagagctgcgacaaaacccacacatgtcctccctgtcctgcccctgaactgctgggcgggccttccgtgttcctgtttcctcctaagcctaaggatacactgatgattagcaggacacccgaggtcacctgcgtcgtggtcgacgtctcccacgaggaccctgaagtgaaatttaattggtatgtcgatggagtcgaggtccacaatgccaagaccaaacctagagaggaacaatataattccacatatagagtcgtgtccgtcctcacagtcctccaccaagattggctcaatggcaaagagtataaatgcaaagtgagcaataaggctctgcccgctcccattgaaaaaacaatctccaaagctaagggccaacccagagaaccccaggtgtatacactgcccccctgcagagaagagatgaccaaaaaccaggtcagcctgtggtgtctcgtgaaaggattctatcctagcgacattgccgtggagtgggagtccaatggccagcctgagaataactataagaccaccccccctgtgctggactccgatggatccttcttcctctacagcaagctgacagtggataaaagcagatggcaacagggaaacgtgttcagctgtagcgtcatgcatgaagccctgcacaatcattatacccaaaaaagcctctccctgtctccaggaggtggtggaggaagcggaggtggcggtagtcaggtgcaactggtcgagtccggcggaggcgtcgtgcaacctggcaggagcctcagactctcctgtgctgctagcggcttcaccaattctaagacgtacctgggatgggtgcgtagggctccaggcaagggacttgagtgggttgcagccatcgccccgagcacaggaagtacctattacgacgattcagtgaagggccggtttaccatttccagggataactctaagaacactctgtatcttcaaatgaactccttacgggctgaagacaccgcagtctactattgtgccagccaggggtcatcatggtacgagaatgactactggggccaaggaaccctggttacagtcagcagctaatag

SEQ ID NO: 8625 - DNA, 1752 bp, synthetic construct
  source 1..1752: mol_type = other DNA
gaggtgcaactggtagagagcggcgggggcttagtccagcctgggggctccctccggctgtcttgttccgcaagcggattcactttttcatccttcggcatgcactgggtcagacaagctccgggcaaaggacttgaatgggtggcatatatcagctcagggagttccaccatttactacggggacaccgttaaaggcaggttcacgattagtagggataatgccaagaattccctcttcctgcaaatgtctagccttagagccgaggatactgccgtttactactgtgcgcgagaagggggctactactacggacgctcatactacactatggattattggggccaagggacgaccgtaactgtaagctctgcatcaacgaaaggccctagtgtgtttcctctcgcacccagcagtaaaagcacctcagggggtactgctgccctgggctgccttgtgaaagattatttcccggaacctgttactgtgtcttggaatagcggcgctctcacctctggtgttcacacttttccggcagttttgcagtccagcggactttattccctttcatcagtcgtgaccgtcccaagttcctctctgggaacccagacatacatctgcaacgtgaaccacaaaccctctaacactaaggttgataagaaggtggaacctaagagctgcgacaaaacccacacatgtcctccctgtcctgcccctgaactgctgggcgggccttccgtgttcctgtttcctcctaagcctaaggatacactgatgattagcaggacacccgaggtcacctgcgtcgtggtcgacgtctcccacgaggaccctgaagtgaaatttaattggtatgtcgatggagtcgaggtccacaatgccaagaccaaacctagagaggaacaatataattccacatatagagtcgtgtccgtcctcacagtcctccaccaagattggctcaatggcaaagagtataaatgcaaagtgagcaataaggctctgcccgctcccattgaaaaaacaatctccaaagctaagggccaacccagagaaccccaggtgtatacactgcccccctgcagagaagagatgaccaaaaaccaggtcagcctgtggtgtctcgtgaaaggattctatcctagcgacattgccgtggagtgggagtccaatggccagcctgagaataactataagaccaccccccctgtgctggactccgatggatccttcttcctctacagcaagctgacagtggataaaagcagatggcaacagggaaacgtgttcagctgtagcgtcatgcatgaagccctgcacaatcattatacccaaaaaagcctctccctgtctccaggaggtggtggaggaagcggaggtggcggtagtcaggtgcaactggtcgagtccggcggaggcgtcgtgcaacctggcaggagcctcagactctcctgtgctgctagcggcttccgatttgatgactacgccatgggatggttccgtcaggctccaggcaaggagcgagagggtgttgcaggatacaaaagcgacggaagtacaacctatgcagactccgtaaaggggcgattcaccatctcccgggacaatagtaaaaacacactttacttacagatgaatagccttcgtgccgaagataccgccgtgtattactgtgctagtagggccctgtacggcggaaagccgttcgtgatctggggccaaggaaccctggttacagtcagcagctaatag

SEQ ID NO: 8626 - DNA, 1776 bp, synthetic construct
  source 1..1776: mol_type = other DNA
gaggtgcaactggtagagagcggcgggggcttagtccagcctgggggctccctccggctgtcttgttccgcaagcggattcactttttcatccttcggcatgcactgggtcagacaagctccgggcaaaggacttgaatgggtggcatatatcagctcagggagttccaccatttactacggggacaccgttaaaggcaggttcacgattagtagggataatgccaagaattccctcttcctgcaaatgtctagccttagagccgaggatactgccgtttactactgtgcgcgagaagggggctactactacggacgctcatactacactatggattattggggccaagggacgaccgtaactgtaagctctgcatcaacgaaaggccctagtgtgtttcctctcgcacccagcagtaaaagcacctcagggggtactgctgccctgggctgccttgtgaaagattatttcccggaacctgttactgtgtcttggaatagcggcgctctcacctctggtgttcacacttttccggcagttttgcagtccagcggactttattccctttcatcagtcgtgaccgtcccaagttcctctctgggaacccagacatacatctgcaacgtgaaccacaaaccctctaacactaaggttgataagaaggtggaacctaagagctgcgacaaaacccacacatgtcctccctgtcctgcccctgaactgctgggcgggccttccgtgttcctgtttcctcctaagcctaaggatacactgatgattagcaggacacccgaggtcacctgcgtcgtggtcgacgtctcccacgaggaccctgaagtgaaatttaattggtatgtcgatggagtcgaggtccacaatgccaagaccaaacctagagaggaacaatataattccacatatagagtcgtgtccgtcctcacagtcctccaccaagattggctcaatggcaaagagtataaatgcaaagtgagcaataaggctctgcccgctcccattgaaaaaacaatctccaaagctaagggccaacccagagaaccccaggtgtatacactgcccccctgcagagaagagatgaccaaaaaccaggtcagcctgtggtgtctcgtgaaaggattctatcctagcgacattgccgtggagtgggagtccaatggccagcctgagaataactataagaccaccccccctgtgctggactccgatggatccttcttcctctacagcaagctgacagtggataaaagcagatggcaacagggaaacgtgttcagctgtagcgtcatgcatgaagccctgcacaatcattatacccaaaaaagcctctccctgtctccaggaggtggtggaggaagcggaggtggcggtagtcaggtgcaactggtcgagtccggcggaggcgtcgtgcaacctggcaggagcctcagactctcctgtgctgctagcggcagtcctgatcgtagggcgtgcatgggatggtaccgtcaggctccaggcaaggagcgagagcgtgttgcagagatcgatacggacggaaacacatcctatgcagactccgtaaaggggcgattcaccatctcccgggacaatagtaaaaacacagtctacttacagatgaatagccttcgtgccgaagataccgccgtgtattactgtgctctgcagcccgggtgccccccagcgacgctcttctactggagaaaaacaggattcggtaactggggccaaggaaccctggttacagtcagcagctaatag

SEQ ID NO: 8627 - DNA, 1761 bp, synthetic construct
  source 1..1761: mol_type = other DNA
gaggtgcaactggtagagagcggcgggggcttagtccagcctgggggctccctccggctgtcttgttccgcaagcggattcactttttcatccttcggcatgcactgggtcagacaagctccgggcaaaggacttgaatgggtggcatatatcagctcagggagttccaccatttactacggggacaccgttaaaggcaggttcacgattagtagggataatgccaagaattccctcttcctgcaaatgtctagccttagagccgaggatactgccgtttactactgtgcgcgagaagggggctactactacggacgctcatactacactatggattattggggccaagggacgaccgtaactgtaagctctgcatcaacgaaaggccctagtgtgtttcctctcgcacccagcagtaaaagcacctcagggggtactgctgccctgggctgccttgtgaaagattatttcccggaacctgttactgtgtcttggaatagcggcgctctcacctctggtgttcacacttttccggcagttttgcagtccagcggactttattccctttcatcagtcgtgaccgtcccaagttcctctctgggaacccagacatacatctgcaacgtgaaccacaaaccctctaacactaaggttgataagaaggtggaacctaagagctgcgacaaaacccacacatgtcctccctgtcctgcccctgaactgctgggcgggccttccgtgttcctgtttcctcctaagcctaaggatacactgatgattagcaggacacccgaggtcacctgcgtcgtggtcgacgtctcccacgaggaccctgaagtgaaatttaattggtatgtcgatggagtcgaggtccacaatgccaagaccaaacctagagaggaacaatataattccacatatagagtcgtgtccgtcctcacagtcctccaccaagattggctcaatggcaaagagtataaatgcaaagtgagcaataaggctctgcccgctcccattgaaaaaacaatctccaaagctaagggccaacccagagaaccccaggtgtatacactgcccccctgcagagaagagatgaccaaaaaccaggtcagcctgtggtgtctcgtgaaaggattctatcctagcgacattgccgtggagtgggagtccaatggccagcctgagaataactataagaccaccccccctgtgctggactccgatggatccttcttcctctacagcaagctgacagtggataaaagcagatggcaacagggaaacgtgttcagctgtagcgtcatgcatgaagccctgcacaatcattatacccaaaaaagcctctccctgtctccaggaggtggtggaggaagcggaggtggcggtagtcaggtgcaactggtcgagtccggcggaggcgtcgtgcaacctggcaggagcctcagactctcctgtgctgctagcggcttcacctttgatgacacggacatgggatggttccgtcaggctccaggcaaggagcgagagcgtgttagtacaatcaatagcgacggaggaacaacctattacgccgattcagtgaagggccggtttaccatttccagggataactctaagaacactctgtatcttcaaatgaactccttacgggctgaagacaccgcagtctactattgtgccagggccagggtaaccgacgcggggtggcagtacttcgactattggggccaaggaaccctggttacagtcagcagctaatag

SEQ ID NO: 8628 - DNA, 1746 bp, synthetic construct
  source 1..1746: mol_type = other DNA
gaggtgcaactggtagagagcggcgggggcttagtccagcctgggggctccctccggctgtcttgttccgcaagcggattcactttttcatccttcggcatgcactgggtcagacaagctccgggcaaaggacttgaatgggtggcatatatcagctcagggagttccaccatttactacggggacaccgttaaaggcaggttcacgattagtagggataatgccaagaattccctcttcctgcaaatgtctagccttagagccgaggatactgccgtttactactgtgcgcgagaagggggctactactacggacgctcatactacactatggattattggggccaagggacgaccgtaactgtaagctctgcatcaacgaaaggccctagtgtgtttcctctcgcacccagcagtaaaagcacctcagggggtactgctgccctgggctgccttgtgaaagattatttcccggaacctgttactgtgtcttggaatagcggcgctctcacctctggtgttcacacttttccggcagttttgcagtccagcggactttattccctttcatcagtcgtgaccgtcccaagttcctctctgggaacccagacatacatctgcaacgtgaaccacaaaccctctaacactaaggttgataagaaggtggaacctaagagctgcgacaaaacccacacatgtcctccctgtcctgcccctgaactgctgggcgggccttccgtgttcctgtttcctcctaagcctaaggatacactgatgattagcaggacacccgaggtcacctgcgtcgtggtcgacgtctcccacgaggaccctgaagtgaaatttaattggtatgtcgatggagtcgaggtccacaatgccaagaccaaacctagagaggaacaatataattccacatatagagtcgtgtccgtcctcacagtcctccaccaagattggctcaatggcaaagagtataaatgcaaagtgagcaataaggctctgcccgctcccattgaaaaaacaatctccaaagctaagggccaacccagagaaccccaggtgtatacactgcccccctgcagagaagagatgaccaaaaaccaggtcagcctgtggtgtctcgtgaaaggattctatcctagcgacattgccgtggagtgggagtccaatggccagcctgagaataactataagaccaccccccctgtgctggactccgatggatccttcttcctctacagcaagctgacagtggataaaagcagatggcaacagggaaacgtgttcagctgtagcgtcatgcatgaagccctgcacaatcattatacccaaaaaagcctctccctgtctccaggaggtggtggaggaagcggaggtggcggtagtcaggtgcaactggtcgagtccggcggaggcgtcgtgcaacctggcaggagcctcagactctcctgtgctgctagcggcttcaccttttctgactactacatcggatggttccgtcaggctccaggcaaggagcgagagcgtgttgcacagatcgataagaacggagtgacaaattatgcagacgccgtaaaggggcgattcaccatctcccgggacaatagtaaaaacacactttacttacagatgaatagccttcgtgccgaagataccgccgtgtattactgtgctggagtggatgcgttcaattacatggaggtatggggccaaggaaccctggttacagtcagcagctaatag

SEQ ID NO: 8629 - DNA, 1758 bp, synthetic construct
  source 1..1758: mol_type = other DNA
gaggtgcaactggtagagagcggcgggggcttagtccagcctgggggctccctccggctgtcttgttccgcaagcggattcactttttcatccttcggcatgcactgggtcagacaagctccgggcaaaggacttgaatgggtggcatatatcagctcagggagttccaccatttactacggggacaccgttaaaggcaggttcacgattagtagggataatgccaagaattccctcttcctgcaaatgtctagccttagagccgaggatactgccgtttactactgtgcgcgagaagggggctactactacggacgctcatactacactatggattattggggccaagggacgaccgtaactgtaagctctgcatcaacgaaaggccctagtgtgtttcctctcgcacccagcagtaaaagcacctcagggggtactgctgccctgggctgccttgtgaaagattatttcccggaacctgttactgtgtcttggaatagcggcgctctcacctctggtgttcacacttttccggcagttttgcagtccagcggactttattccctttcatcagtcgtgaccgtcccaagttcctctctgggaacccagacatacatctgcaacgtgaaccacaaaccctctaacactaaggttgataagaaggtggaacctaagagctgcgacaaaacccacacatgtcctccctgtcctgcccctgaactgctgggcgggccttccgtgttcctgtttcctcctaagcctaaggatacactgatgattagcaggacacccgaggtcacctgcgtcgtggtcgacgtctcccacgaggaccctgaagtgaaatttaattggtatgtcgatggagtcgaggtccacaatgccaagaccaaacctagagaggaacaatataattccacatatagagtcgtgtccgtcctcacagtcctccaccaagattggctcaatggcaaagagtataaatgcaaagtgagcaataaggctctgcccgctcccattgaaaaaacaatctccaaagctaagggccaacccagagaaccccaggtgtatacactgcccccctgcagagaagagatgaccaaaaaccaggtcagcctgtggtgtctcgtgaaaggattctatcctagcgacattgccgtggagtgggagtccaatggccagcctgagaataactataagaccaccccccctgtgctggactccgatggatccttcttcctctacagcaagctgacagtggataaaagcagatggcaacagggaaacgtgttcagctgtagcgtcatgcatgaagccctgcacaatcattatacccaaaaaagcctctccctgtctccaggaggtggtggaggaagcggaggtggcggtagtcaggtgcaactggtcgagtccggcggaggcgtcgtgcaacctggcaggagcctcagactctcctgtgctgctagcggcgactttaatgatgcaagggccgagtgggggtggtttaggcaagcacctgggaagggccgggaattggtggccagtctcgcgagcgacggaagtaccatttacgccaatcccgtggagggccggtttaccatttccagggataacgctaagaacactctgtatcttcaaatgaactccttacgggctgaagacaccgcagtctactattgtgccaggtcaggggcctcaagtagctggtactggttcgactactggggccaaggaaccctggttacagtcagcagctaatag

SEQ ID NO: 8630 - DNA, 1749 bp, synthetic construct
  source 1..1749: mol_type = other DNA
gaggtgcaactggtagagagcggcgggggcttagtccagcctgggggctccctccggctgtcttgttccgcaagcggattcactttttcatccttcggcatgcactgggtcagacaagctccgggcaaaggacttgaatgggtggcatatatcagctcagggagttccaccatttactacggggacaccgttaaaggcaggttcacgattagtagggataatgccaagaattccctcttcctgcaaatgtctagccttagagccgaggatactgccgtttactactgtgcgcgagaagggggctactactacggacgctcatactacactatggattattggggccaagggacgaccgtaactgtaagctctgcatcaacgaaaggccctagtgtgtttcctctcgcacccagcagtaaaagcacctcagggggtactgctgccctgggctgccttgtgaaagattatttcccggaacctgttactgtgtcttggaatagcggcgctctcacctctggtgttcacacttttccggcagttttgcagtccagcggactttattccctttcatcagtcgtgaccgtcccaagttcctctctgggaacccagacatacatctgcaacgtgaaccacaaaccctctaacactaaggttgataagaaggtggaacctaagagctgcgacaaaacccacacatgtcctccctgtcctgcccctgaactgctgggcgggccttccgtgttcctgtttcctcctaagcctaaggatacactgatgattagcaggacacccgaggtcacctgcgtcgtggtcgacgtctcccacgaggaccctgaagtgaaatttaattggtatgtcgatggagtcgaggtccacaatgccaagaccaaacctagagaggaacaatataattccacatatagagtcgtgtccgtcctcacagtcctccaccaagattggctcaatggcaaagagtataaatgcaaagtgagcaataaggctctgcccgctcccattgaaaaaacaatctccaaagctaagggccaacccagagaaccccaggtgtatacactgcccccctgcagagaagagatgaccaaaaaccaggtcagcctgtggtgtctcgtgaaaggattctatcctagcgacattgccgtggagtgggagtccaatggccagcctgagaataactataagaccaccccccctgtgctggactccgatggatccttcttcctctacagcaagctgacagtggataaaagcagatggcaacagggaaacgtgttcagctgtagcgtcatgcatgaagccctgcacaatcattatacccaaaaaagcctctccctgtctccaggaggtggtggaggaagcggaggtggcggtagtcaggtgcaactggtcgagtccggcggaggcgtcgtgcaacctggcaggagcctcagactctcctgtgctgctagcggcagtattcataataggaggcacatgggatggttccgtcaggctgcaggcaaggagcgagagggtgttgcagccatcgatatagcgggaaacacacggattagtgactccgtaaaggggcgattcaccatctcccatgacaaagacgaaaacagactttacttacagatgaatagccttcgtgccgaagataccgccgtgtattactgtgctatccagtcaagcgacggcagagggacggtatactggggccaaggaaccctggttacagtcagcagctaatag

SEQ ID NO: 8631 - DNA, 1752 bp, synthetic construct
  source 1..1752: mol_type = other DNA
gaggtgcaactggtagagagcggcgggggcttagtccagcctgggggctccctccggctgtcttgttccgcaagcggattcactttttcatccttcggcatgcactgggtcagacaagctccgggcaaaggacttgaatgggtggcatatatcagctcagggagttccaccatttactacggggacaccgttaaaggcaggttcacgattagtagggataatgccaagaattccctcttcctgcaaatgtctagccttagagccgaggatactgccgtttactactgtgcgcgagaagggggctactactacggacgctcatactacactatggattattggggccaagggacgaccgtaactgtaagctctgcatcaacgaaaggccctagtgtgtttcctctcgcacccagcagtaaaagcacctcagggggtactgctgccctgggctgccttgtgaaagattatttcccggaacctgttactgtgtcttggaatagcggcgctctcacctctggtgttcacacttttccggcagttttgcagtccagcggactttattccctttcatcagtcgtgaccgtcccaagttcctctctgggaacccagacatacatctgcaacgtgaaccacaaaccctctaacactaaggttgataagaaggtggaacctaagagctgcgacaaaacccacacatgtcctccctgtcctgcccctgaactgctgggcgggccttccgtgttcctgtttcctcctaagcctaaggatacactgatgattagcaggacacccgaggtcacctgcgtcgtggtcgacgtctcccacgaggaccctgaagtgaaatttaattggtatgtcgatggagtcgaggtccacaatgccaagaccaaacctagagaggaacaatataattccacatatagagtcgtgtccgtcctcacagtcctccaccaagattggctcaatggcaaagagtataaatgcaaagtgagcaataaggctctgcccgctcccattgaaaaaacaatctccaaagctaagggccaacccagagaaccccaggtgtatacactgcccccctgcagagaagagatgaccaaaaaccaggtcagcctgtggtgtctcgtgaaaggattctatcctagcgacattgccgtggagtgggagtccaatggccagcctgagaataactataagaccaccccccctgtgctggactccgatggatccttcttcctctacagcaagctgacagtggataaaagcagatggcaacagggaaacgtgttcagctgtagcgtcatgcatgaagccctgcacaatcattatacccaaaaaagcctctccctgtctccaggaggtggtggaggaagcggaggtggcggtagtcaggtgcaactggtcgagtccggcggaggcgtcgtgcaacctggcaggagcctcagactctcctgtgctgctagcggcagacgaggtaataactactcgatggcctggtaccgtcaggctccaggcaaggaccgagagggtgttgcagccatcgatagcgacggagacacatcctatgcagaccccgtaaaggggcgattcaccatctcccgggacaatagtaaaaacacactttacttacagatgaatagccttcgtgccgaagataccgccgtgtattactgtgctgtggcgaccggggagtatagaaggtacttcgacgtatggggccaaggaaccctggttacagtcagcagctaatag

SEQ ID NO: 8632 - DNA, 1749 bp, synthetic construct
  source 1..1749: mol_type = other DNA
gaggtgcaactggtagagagcggcgggggcttagtccagcctgggggctccctccggctgtcttgttccgcaagcggattcactttttcatccttcggcatgcactgggtcagacaagctccgggcaaaggacttgaatgggtggcatatatcagctcagggagttccaccatttactacggggacaccgttaaaggcaggttcacgattagtagggataatgccaagaattccctcttcctgcaaatgtctagccttagagccgaggatactgccgtttactactgtgcgcgagaagggggctactactacggacgctcatactacactatggattattggggccaagggacgaccgtaactgtaagctctgcatcaacgaaaggccctagtgtgtttcctctcgcacccagcagtaaaagcacctcagggggtactgctgccctgggctgccttgtgaaagattatttcccggaacctgttactgtgtcttggaatagcggcgctctcacctctggtgttcacacttttccggcagttttgcagtccagcggactttattccctttcatcagtcgtgaccgtcccaagttcctctctgggaacccagacatacatctgcaacgtgaaccacaaaccctctaacactaaggttgataagaaggtggaacctaagagctgcgacaaaacccacacatgtcctccctgtcctgcccctgaactgctgggcgggccttccgtgttcctgtttcctcctaagcctaaggatacactgatgattagcaggacacccgaggtcacctgcgtcgtggtcgacgtctcccacgaggaccctgaagtgaaatttaattggtatgtcgatggagtcgaggtccacaatgccaagaccaaacctagagaggaacaatataattccacatatagagtcgtgtccgtcctcacagtcctccaccaagattggctcaatggcaaagagtataaatgcaaagtgagcaataaggctctgcccgctcccattgaaaaaacaatctccaaagctaagggccaacccagagaaccccaggtgtatacactgcccccctgcagagaagagatgaccaaaaaccaggtcagcctgtggtgtctcgtgaaaggattctatcctagcgacattgccgtggagtgggagtccaatggccagcctgagaataactataagaccaccccccctgtgctggactccgatggatccttcttcctctacagcaagctgacagtggataaaagcagatggcaacagggaaacgtgttcagctgtagcgtcatgcatgaagccctgcacaatcattatacccaaaaaagcctctccctgtctccaggaggtggtggaggaagcggaggtggcggtagtcaggtgcaactggtcgagtccggcggaggcgtcgtgcaacctggcaggagcctcagactctcctgtgctgctagcggcttcgcctttactaagtaccacatgtcatggttccgtcaggctccaggcaagggacgagagttagttagtcacatctccgcggggggaagaacatattatagtgactccgtagaggggcgattcaccatctcccgggacaatgccaaaaggatggtctacttacagatgaatagccttcgtgccgaagataccgccgtgtattactgtgttaaggagtcaaggccccacagttacggggaccactggggccaaggaaccctggttacagtcagcagctaatag

SEQ ID NO: 8633 - protein, 580 aa, synthetic construct
EVQLVESGGGLVQPGGSLRLSCSASGFTFSSFGMHWVRQAPGKGLEWVAYISSGSSTIYYGDTVKGRFTISRDNAKNSLFLQMSSLRAEDTAVYYCAREGGYYYGRSYYTMDYWGQGTTVTVSSASTKGPSVFPLAPSSKSTSGGTAALGCLVKDYFPEPVTVSWNSGALTSGVHTFPAVLQSSGLYSLSSVVTVPSSSLGTQTYICNVNHKPSNTKVDKKVEPKSCDKTHTCPPCPAPELLGGPSVFLFPPKPKDTLMISRTPEVTCVVVDVSHEDPEVKFNWYVDGVEVHNAKTKPREEQYNSTYRVVSVLTVLHQDWLNGKEYKCKVSNKALPAPIEKTISKAKGQPREPQVYTLPPSREEMTKNQVSLTCLVKGFYPSDIAVEWESNGQPENNYKTTPPVLDSDGSFFLYSKLTVDKSRWQQGNVFSCSVMHEALHNHYTQKSLSLSPGGGGGSGGGGSQVQLVESGGGVVQPGRSLRLSCAASGFSFSNFGMSWVRQARGKGLEWVSSTGSDGTAYYADSVKGRFTISRDNAKNTLYLQMNSLRAEDTAVYYCARAPSRHGFDYWGQGTLVTVSS

SEQ ID NO: 8634 - protein, 580 aa, synthetic construct
EVQLVESGGGLVQPGGSLRLSCSASGFTFSSFGMHWVRQAPGKGLEWVAYISSGSSTIYYGDTVKGRFTISRDNAKNSLFLQMSSLRAEDTAVYYCAREGGYYYGRSYYTMDYWGQGTTVTVSSASTKGPSVFPLAPSSKSTSGGTAALGCLVKDYFPEPVTVSWNSGALTSGVHTFPAVLQSSGLYSLSSVVTVPSSSLGTQTYICNVNHKPSNTKVDKKVEPKSCDKTHTCPPCPAPELLGGPSVFLFPPKPKDTLMISRTPEVTCVVVDVSHEDPEVKFNWYVDGVEVHNAKTKPREEQYNSTYRVVSVLTVLHQDWLNGKEYKCKVSNKALPAPIEKTISKAKGQPREPQVYTLPPSREEMTKNQVSLTCLVKGFYPSDIAVEWESNGQPENNYKTTPPVLDSDGSFFLYSKLTVDKSRWQQGNVFSCSVMHEALHNHYTQKSLSLSPGGGGGSGGGGSQVQLVESGGGVVQPGRSLRLSCAASGFSFSNFGMSWVRQARGKGLEWVSSIGSDGRAYYADSVKGRFTISRDNAKNTLYLQMNSLRAEDTAVYYCARAPSRHGFDYWGQGTLVTVSS

SEQ ID NO: 8635 - protein, 580 aa, synthetic construct
EVQLVESGGGLVQPGGSLRLSCSASGFTFSSFGMHWVRQAPGKGLEWVAYISSGSSTIYYGDTVKGRFTISRDNAKNSLFLQMSSLRAEDTAVYYCAREGGYYYGRSYYTMDYWGQGTTVTVSSASTKGPSVFPLAPSSKSTSGGTAALGCLVKDYFPEPVTVSWNSGALTSGVHTFPAVLQSSGLYSLSSVVTVPSSSLGTQTYICNVNHKPSNTKVDKKVEPKSCDKTHTCPPCPAPELLGGPSVFLFPPKPKDTLMISRTPEVTCVVVDVSHEDPEVKFNWYVDGVEVHNAKTKPREEQYNSTYRVVSVLTVLHQDWLNGKEYKCKVSNKALPAPIEKTISKAKGQPREPQVYTLPPSREEMTKNQVSLTCLVKGFYPSDIAVEWESNGQPENNYKTTPPVLDSDGSFFLYSKLTVDKSRWQQGNVFSCSVMHEALHNHYTQKSLSLSPGGGGGSGGGGSQVQLVESGGGVVQPGRSLRLSCAASGFSFSNFGMSWVRQARGKGLEWVSSVGSDGTAYYADSVKGRFTISRDNAKNTLYLQMNSLRAEDTAVYYCARAPSRHGFDYWGQGTLVTVSS

SEQ ID NO: 8636 - protein, 580 aa, synthetic construct
EVQLVESGGGLVQPGGSLRLSCSASGFTFSSFGMHWVRQAPGKGLEWVAYISSGSSTIYYGDTVKGRFTISRDNAKNSLFLQMSSLRAEDTAVYYCAREGGYYYGRSYYTMDYWGQGTTVTVSSASTKGPSVFPLAPSSKSTSGGTAALGCLVKDYFPEPVTVSWNSGALTSGVHTFPAVLQSSGLYSLSSVVTVPSSSLGTQTYICNVNHKPSNTKVDKKVEPKSCDKTHTCPPCPAPELLGGPSVFLFPPKPKDTLMISRTPEVTCVVVDVSHEDPEVKFNWYVDGVEVHNAKTKPREEQYNSTYRVVSVLTVLHQDWLNGKEYKCKVSNKALPAPIEKTISKAKGQPREPQVYTLPPSREEMTKNQVSLTCLVKGFYPSDIAVEWESNGQPENNYKTTPPVLDSDGSFFLYSKLTVDKSRWQQGNVFSCSVMHEALHNHYTQKSLSLSPGGGGGSGGGGSQVQLVESGGGVVQPGRSLRLSCAASGFSFSNFGMSWVRQAPGKGLEWVSSTGSDGTAYYADSVKGRFTISRDNAKNTLHLQMNSLRAEDTAVYYCARAPSRHGFDYWGQGTLVTVSS

SEQ ID NO: 8637 - protein, 579 aa, synthetic construct
EVQLVESGGGLVQPGGSLRLSCSASGFTFSSFGMHWVRQAPGKGLEWVAYISSGSSTIYYGDTVKGRFTISRDNAKNSLFLQMSSLRAEDTAVYYCAREGGYYYGRSYYTMDYWGQGTTVTVSSASTKGPSVFPLAPSSKSTSGGTAALGCLVKDYFPEPVTVSWNSGALTSGVHTFPAVLQSSGLYSLSSVVTVPSSSLGTQTYICNVNHKPSNTKVDKKVEPKSCDKTHTCPPCPAPELLGGPSVFLFPPKPKDTLMISRTPEVTCVVVDVSHEDPEVKFNWYVDGVEVHNAKTKPREEQYNSTYRVVSVLTVLHQDWLNGKEYKCKVSNKALPAPIEKTISKAKGQPREPQVYTLPPSREEMTKNQVSLTCLVKGFYPSDIAVEWESNGQPENNYKTTPPVLDSDGSFFLYSKLTVDKSRWQQGNVFSCSVMHEALHNHYTQKSLSLSPGGGGGSGGGGSQVQLVESGGGVVQPGRSLRLSCAASGFAVDASDMGWFRQAPGKGRELVSSISSDNDTYYADSVEGRFTISRDNAKRMVYLQMNSLRAEDTAVYYCASGRFLEPDYWGQGTLVTVSS

SEQ ID NO: 8638 - protein, 580 aa, synthetic construct
EVQLVESGGGLVQPGGSLRLSCSASGFTFSSFGMHWVRQAPGKGLEWVAYISSGSSTIYYGDTVKGRFTISRDNAKNSLFLQMSSLRAEDTAVYYCAREGGYYYGRSYYTMDYWGQGTTVTVSSASTKGPSVFPLAPSSKSTSGGTAALGCLVKDYFPEPVTVSWNSGALTSGVHTFPAVLQSSGLYSLSSVVTVPSSSLGTQTYICNVNHKPSNTKVDKKVEPKSCDKTHTCPPCPAPELLGGPSVFLFPPKPKDTLMISRTPEVTCVVVDVSHEDPEVKFNWYVDGVEVHNAKTKPREEQYNSTYRVVSVLTVLHQDWLNGKEYKCKVSNKALPAPIEKTISKAKGQPREPQVYTLPPSREEMTKNQVSLTCLVKGFYPSDIAVEWESNGQPENNYKTTPPVLDSDGSFFLYSKLTVDKSRWQQGNVFSCSVMHEALHNHYTQKSLSLSPGGGGGSGGGGSQVQLVESGGGVVQPGRSLRLSCAASGFTFDDSDMGWFRQAPGKGRELVAAINTGGGKTYYAATVEGRFTISRDNAKRMVYLQMNSLRAEDTAVYYCASGRFLEPDYWGQGTLVTVSS

SEQ ID NO: 8639 - protein, 581 aa, synthetic construct
EVQLVESGGGLVQPGGSLRLSCSASGFTFSSFGMHWVRQAPGKGLEWVAYISSGSSTIYYGDTVKGRFTISRDNAKNSLFLQMSSLRAEDTAVYYCAREGGYYYGRSYYTMDYWGQGTTVTVSSASTKGPSVFPLAPSSKSTSGGTAALGCLVKDYFPEPVTVSWNSGALTSGVHTFPAVLQSSGLYSLSSVVTVPSSSLGTQTYICNVNHKPSNTKVDKKVEPKSCDKTHTCPPCPAPELLGGPSVFLFPPKPKDTLMISRTPEVTCVVVDVSHEDPEVKFNWYVDGVEVHNAKTKPREEQYNSTYRVVSVLTVLHQDWLNGKEYKCKVSNKALPAPIEKTISKAKGQPREPQVYTLPPSREEMTKNQVSLTCLVKGFYPSDIAVEWESNGQPENNYKTTPPVLDSDGSFFLYSKLTVDKSRWQQGNVFSCSVMHEALHNHYTQKSLSLSPGGGGGSGGGGSQVQLVESGGGVVQPGRSLRLSCAASGLTFDDSDMGWFRQAPGKERERVSTISSDGTPHYDDSVKGRFTISRDNSKNTLYLQMNSLRAEDTAVYYCARRDGGSWNFDYWGQGTLVTVSS

SEQ ID NO: 8640 - protein, 580 aa, synthetic construct
EVQLVESGGGLVQPGGSLRLSCSASGFTFSSFGMHWVRQAPGKGLEWVAYISSGSSTIYYGDTVKGRFTISRDNAKNSLFLQMSSLRAEDTAVYYCAREGGYYYGRSYYTMDYWGQGTTVTVSSASTKGPSVFPLAPSSKSTSGGTAALGCLVKDYFPEPVTVSWNSGALTSGVHTFPAVLQSSGLYSLSSVVTVPSSSLGTQTYICNVNHKPSNTKVDKKVEPKSCDKTHTCPPCPAPELLGGPSVFLFPPKPKDTLMISRTPEVTCVVVDVSHEDPEVKFNWYVDGVEVHNAKTKPREEQYNSTYRVVSVLTVLHQDWLNGKEYKCKVSNKALPAPIEKTISKAKGQPREPQVYTLPPSREEMTKNQVSLTCLVKGFYPSDIAVEWESNGQPENNYKTTPPVLDSDGSFFLYSKLTVDKSRWQQGNVFSCSVMHEALHNHYTQKSLSLSPGGGGGSGGGGSQVQLVESGGGVVQPGRSLRLSCAASGFTFDGSDIAWVRRAPGKGEEWVSTISSDGTVYYSDPVKGRFTISADTSKNTAYLQMNSLRAEDTAVYYCAISSWYGDFDYWGQGTLVTVSS

SEQ ID NO: 8641 - protein, 584 aa, synthetic construct
EVQLVESGGGLVQPGGSLRLSCSASGFTFSSFGMHWVRQAPGKGLEWVAYISSGSSTIYYGDTVKGRFTISRDNAKNSLFLQMSSLRAEDTAVYYCAREGGYYYGRSYYTMDYWGQGTTVTVSSASTKGPSVFPLAPSSKSTSGGTAALGCLVKDYFPEPVTVSWNSGALTSGVHTFPAVLQSSGLYSLSSVVTVPSSSLGTQTYICNVNHKPSNTKVDKKVEPKSCDKTHTCPPCPAPELLGGPSVFLFPPKPKDTLMISRTPEVTCVVVDVSHEDPEVKFNWYVDGVEVHNAKTKPREEQYNSTYRVVSVLTVLHQDWLNGKEYKCKVSNKALPAPIEKTISKAKGQPREPQVYTLPPSREEMTKNQVSLTCLVKGFYPSDIAVEWESNGQPENNYKTTPPVLDSDGSFFLYSKLTVDKSRWQQGNVFSCSVMHEALHNHYTQKSLSLSPGGGGGSGGGGSQVQLVESGGGVVQPGRSLRLSCAASGHILNYWYMGWVRRAPGKGEEWVAGISPGGTVTVYADSVKGRFTISRDNSKNTLYLQMNSLRAEDTAVYYCARGGQGGDAWAFDYWGQGTLVTVSS

SEQ ID NO: 8642 - protein, 583 aa, synthetic construct
EVQLVESGGGLVQPGGSLRLSCSASGFTFSSFGMHWVRQAPGKGLEWVAYISSGSSTIYYGDTVKGRFTISRDNAKNSLFLQMSSLRAEDTAVYYCAREGGYYYGRSYYTMDYWGQGTTVTVSSASTKGPSVFPLAPSSKSTSGGTAALGCLVKDYFPEPVTVSWNSGALTSGVHTFPAVLQSSGLYSLSSVVTVPSSSLGTQTYICNVNHKPSNTKVDKKVEPKSCDKTHTCPPCPAPELLGGPSVFLFPPKPKDTLMISRTPEVTCVVVDVSHEDPEVKFNWYVDGVEVHNAKTKPREEQYNSTYRVVSVLTVLHQDWLNGKEYKCKVSNKALPAPIEKTISKAKGQPREPQVYTLPPSREEMTKNQVSLTCLVKGFYPSDIAVEWESNGQPENNYKTTPPVLDSDGSFFLYSKLTVDKSRWQQGNVFSCSVMHEALHNHYTQKSLSLSPGGGGGSGGGGSQVQLVESGGGVVQPGRSLRLSCAASGFGVASSDMGWFRQAPGKGRELVASINTDGSTIYAESVEGRFTISRDNAKRMVYLQMNSLRAEDTAVYYCAAYDTSAYHSPFDYWGQGTLVTVSS

SEQ ID NO: 8643 - protein, 582 aa, synthetic construct
EVQLVESGGGLVQPGGSLRLSCSASGFTFSSFGMHWVRQAPGKGLEWVAYISSGSSTIYYGDTVKGRFTISRDNAKNSLFLQMSSLRAEDTAVYYCAREGGYYYGRSYYTMDYWGQGTTVTVSSASTKGPSVFPLAPSSKSTSGGTAALGCLVKDYFPEPVTVSWNSGALTSGVHTFPAVLQSSGLYSLSSVVTVPSSSLGTQTYICNVNHKPSNTKVDKKVEPKSCDKTHTCPPCPAPELLGGPSVFLFPPKPKDTLMISRTPEVTCVVVDVSHEDPEVKFNWYVDGVEVHNAKTKPREEQYNSTYRVVSVLTVLHQDWLNGKEYKCKVSNKALPAPIEKTISKAKGQPREPQVYTLPPSREEMTKNQVSLTCLVKGFYPSDIAVEWESNGQPENNYKTTPPVLDSDGSFFLYSKLTVDKSRWQQGNVFSCSVMHEALHNHYTQKSLSLSPGGGGGSGGGGSQVQLVESGGGVVQPGRSLRLSCAASGYTFRSASMGWVRRAPGKGEEWVAVIDSEGHTIYADSVKGRFTISADTSKNTAYLQMNSLRAEDTAVYYCAKDIYGDYGGPDYWGQGTLVTVSS

SEQ ID NO: 8644 - protein, 582 aa, synthetic construct
EVQLVESGGGLVQPGGSLRLSCSASGFTFSSFGMHWVRQAPGKGLEWVAYISSGSSTIYYGDTVKGRFTISRDNAKNSLFLQMSSLRAEDTAVYYCAREGGYYYGRSYYTMDYWGQGTTVTVSSASTKGPSVFPLAPSSKSTSGGTAALGCLVKDYFPEPVTVSWNSGALTSGVHTFPAVLQSSGLYSLSSVVTVPSSSLGTQTYICNVNHKPSNTKVDKKVEPKSCDKTHTCPPCPAPELLGGPSVFLFPPKPKDTLMISRTPEVTCVVVDVSHEDPEVKFNWYVDGVEVHNAKTKPREEQYNSTYRVVSVLTVLHQDWLNGKEYKCKVSNKALPAPIEKTISKAKGQPREPQVYTLPPSREEMTKNQVSLTCLVKGFYPSDIAVEWESNGQPENNYKTTPPVLDSDGSFFLYSKLTVDKSRWQQGNVFSCSVMHEALHNHYTQKSLSLSPGGGGGSGGGGSQVQLVESGGGVVQPGRSLRLSCAASGTRRPNYVTWFRQAPLNERQVVAGIDSAGTTTYADSVKGRFTISQDNAKNTVYLQMNSLRAEDTAVYYCASGISSSSFYPFDSWGQGTLVTVSS

SEQ ID NO: 8645 - protein, 581 aa, synthetic construct
EVQLVESGGGLVQPGGSLRLSCSASGFTFSSFGMHWVRQAPGKGLEWVAYISSGSSTIYYGDTVKGRFTISRDNAKNSLFLQMSSLRAEDTAVYYCAREGGYYYGRSYYTMDYWGQGTTVTVSSASTKGPSVFPLAPSSKSTSGGTAALGCLVKDYFPEPVTVSWNSGALTSGVHTFPAVLQSSGLYSLSSVVTVPSSSLGTQTYICNVNHKPSNTKVDKKVEPKSCDKTHTCPPCPAPELLGGPSVFLFPPKPKDTLMISRTPEVTCVVVDVSHEDPEVKFNWYVDGVEVHNAKTKPREEQYNSTYRVVSVLTVLHQDWLNGKEYKCKVSNKALPAPIEKTISKAKGQPREPQVYTLPPSREEMTKNQVSLTCLVKGFYPSDIAVEWESNGQPENNYKTTPPVLDSDGSFFLYSKLTVDKSRWQQGNVFSCSVMHEALHNHYTQKSLSLSPGGGGGSGGGGSQVQLVESGGGVVQPGRSLRLSCAASGFNFDDSDMGWFRQAPGKGRELVSSIASDGATYYADSVEGRFTISRDNAKRMVYLQMNSLRAEDTAVYYCARDSPSLRAFDSWGQGTLVTVSS

SEQ ID NO: 8646 - protein, 582 aa, synthetic construct
EVQLVESGGGLVQPGGSLRLSCSASGFTFSSFGMHWVRQAPGKGLEWVAYISSGSSTIYYGDTVKGRFTISRDNAKNSLFLQMSSLRAEDTAVYYCAREGGYYYGRSYYTMDYWGQGTTVTVSSASTKGPSVFPLAPSSKSTSGGTAALGCLVKDYFPEPVTVSWNSGALTSGVHTFPAVLQSSGLYSLSSVVTVPSSSLGTQTYICNVNHKPSNTKVDKKVEPKSCDKTHTCPPCPAPELLGGPSVFLFPPKPKDTLMISRTPEVTCVVVDVSHEDPEVKFNWYVDGVEVHNAKTKPREEQYNSTYRVVSVLTVLHQDWLNGKEYKCKVSNKALPAPIEKTISKAKGQPREPQVYTLPPSREEMTKNQVSLTCLVKGFYPSDIAVEWESNGQPENNYKTTPPVLDSDGSFFLYSKLTVDKSRWQQGNVFSCSVMHEALHNHYTQKSLSLSPGGGGGSGGGGSQVQLVESGGGVVQPGRSLRLSCAASGTTYSRQYCMGWARQAPGKGLEWVSCIDDDGNTYYADSVKGRFTISRDNSKNTLYLQMNSLRAEDTAVYYCARDPGLSGDFDYWGQGTLVTVSS

SEQ ID NO: 8647 - protein, 583 aa, synthetic construct
EVQLVESGGGLVQPGGSLRLSCSASGFTFSSFGMHWVRQAPGKGLEWVAYISSGSSTIYYGDTVKGRFTISRDNAKNSLFLQMSSLRAEDTAVYYCAREGGYYYGRSYYTMDYWGQGTTVTVSSASTKGPSVFPLAPSSKSTSGGTAALGCLVKDYFPEPVTVSWNSGALTSGVHTFPAVLQSSGLYSLSSVVTVPSSSLGTQTYICNVNHKPSNTKVDKKVEPKSCDKTHTCPPCPAPELLGGPSVFLFPPKPKDTLMISRTPEVTCVVVDVSHEDPEVKFNWYVDGVEVHNAKTKPREEQYNSTYRVVSVLTVLHQDWLNGKEYKCKVSNKALPAPIEKTISKAKGQPREPQVYTLPPSREEMTKNQVSLTCLVKGFYPSDIAVEWESNGQPENNYKTTPPVLDSDGSFFLYSKLTVDKSRWQQGNVFSCSVMHEALHNHYTQKSLSLSPGGGGGSGGGGSQVQLVESGGGVVQPGRSLRLSCAASGITYRGPCMGWYRQAPGKGLEWVATLDSDGSTTYADSVKGRFTISRDNSKNTLYLQMNSLRAEDTAVYYCAMYMTGGGGVAFDYWGQGTLVTVSS

SEQ ID NO: 8648 - protein, 582 aa, synthetic construct
EVQLVESGGGLVQPGGSLRLSCSASGFTFSSFGMHWVRQAPGKGLEWVAYISSGSSTIYYGDTVKGRFTISRDNAKNSLFLQMSSLRAEDTAVYYCAREGGYYYGRSYYTMDYWGQGTTVTVSSASTKGPSVFPLAPSSKSTSGGTAALGCLVKDYFPEPVTVSWNSGALTSGVHTFPAVLQSSGLYSLSSVVTVPSSSLGTQTYICNVNHKPSNTKVDKKVEPKSCDKTHTCPPCPAPELLGGPSVFLFPPKPKDTLMISRTPEVTCVVVDVSHEDPEVKFNWYVDGVEVHNAKTKPREEQYNSTYRVVSVLTVLHQDWLNGKEYKCKVSNKALPAPIEKTISKAKGQPREPQVYTLPPSREEMTKNQVSLTCLVKGFYPSDIAVEWESNGQPENNYKTTPPVLDSDGSFFLYSKLTVDKSRWQQGNVFSCSVMHEALHNHYTQKSLSLSPGGGGGSGGGGSQVQLVESGGGVVQPGRSLRLSCAASGFTFSKYAMNWARQAPGKGLEWVAFIDTAGRTIYADSVKGRFTISRDNSKNTLYLQMNSLRAEDTAVYYCAPSYGDSGDYFDYWGQGTLVTVSS

SEQ ID NO: 8649 - protein, 584 aa, synthetic construct
EVQLVESGGGLVQPGGSLRLSCSASGFTFSSFGMHWVRQAPGKGLEWVAYISSGSSTIYYGDTVKGRFTISRDNAKNSLFLQMSSLRAEDTAVYYCAREGGYYYGRSYYTMDYWGQGTTVTVSSASTKGPSVFPLAPSSKSTSGGTAALGCLVKDYFPEPVTVSWNSGALTSGVHTFPAVLQSSGLYSLSSVVTVPSSSLGTQTYICNVNHKPSNTKVDKKVEPKSCDKTHTCPPCPAPELLGGPSVFLFPPKPKDTLMISRTPEVTCVVVDVSHEDPEVKFNWYVDGVEVHNAKTKPREEQYNSTYRVVSVLTVLHQDWLNGKEYKCKVSNKALPAPIEKTISKAKGQPREPQVYTLPPSREEMTKNQVSLTCLVKGFYPSDIAVEWESNGQPENNYKTTPPVLDSDGSFFLYSKLTVDKSRWQQGNVFSCSVMHEALHNHYTQKSLSLSPGGGGGSGGGGSQVQLVESGGGVVQPGRSLRLSCAASGFPFSSYGMGWFRQAPGKEREGVAGVNTGGRTSYAESVKGRFTISRDNTRNTLYLQMNSLRAEDTAVYYCARIRAAGTVAPYFDYWGQGTLVTVSS

SEQ ID NO: 8650 - protein, 581 aa, synthetic construct
EVQLVESGGGLVQPGGSLRLSCSASGFTFSSFGMHWVRQAPGKGLEWVAYISSGSSTIYYGDTVKGRFTISRDNAKNSLFLQMSSLRAEDTAVYYCAREGGYYYGRSYYTMDYWGQGTTVTVSSASTKGPSVFPLAPSSKSTSGGTAALGCLVKDYFPEPVTVSWNSGALTSGVHTFPAVLQSSGLYSLSSVVTVPSSSLGTQTYICNVNHKPSNTKVDKKVEPKSCDKTHTCPPCPAPELLGGPSVFLFPPKPKDTLMISRTPEVTCVVVDVSHEDPEVKFNWYVDGVEVHNAKTKPREEQYNSTYRVVSVLTVLHQDWLNGKEYKCKVSNKALPAPIEKTISKAKGQPREPQVYTLPPSREEMTKNQVSLTCLVKGFYPSDIAVEWESNGQPENNYKTTPPVLDSDGSFFLYSKLTVDKSRWQQGNVFSCSVMHEALHNHYTQKSLSLSPGGGGGSGGGGSQVQLVESGGGVVQPGRSLRLSCAASGYVAGYVGWYRQAPGKDREGVAAIASDGMTAYAHSVKGRFTISRDNSKNTLYLQMNSLRAEDTAVYYCASGYCSGSGCYFDSWGQGTLVTVSS

SEQ ID NO: 8651 - protein, 579 aa, synthetic construct
EVQLVESGGGLVQPGGSLRLSCSASGFTFSSFGMHWVRQAPGKGLEWVAYISSGSSTIYYGDTVKGRFTISRDNAKNSLFLQMSSLRAEDTAVYYCAREGGYYYGRSYYTMDYWGQGTTVTVSSASTKGPSVFPLAPSSKSTSGGTAALGCLVKDYFPEPVTVSWNSGALTSGVHTFPAVLQSSGLYSLSSVVTVPSSSLGTQTYICNVNHKPSNTKVDKKVEPKSCDKTHTCPPCPAPELLGGPSVFLFPPKPKDTLMISRTPEVTCVVVDVSHEDPEVKFNWYVDGVEVHNAKTKPREEQYNSTYRVVSVLTVLHQDWLNGKEYKCKVSNKALPAPIEKTISKAKGQPREPQVYTLPPSREEMTKNQVSLTCLVKGFYPSDIAVEWESNGQPENNYKTTPPVLDSDGSFFLYSKLTVDKSRWQQGNVFSCSVMHEALHNHYTQKSLSLSPGGGGGSGGGGSQVQLVESGGGVVQPGRSLRLSCAASGFRYNSYAMAWARQAPGKGLEWVAAIAGDGRTDYADSVKGRFTISRDNSKNTLYLQMNSLRAEDTAVYYCAREDTAAFDYWGQGTLVTVSS

SEQ ID NO: 8652 - protein, 589 aa, synthetic construct
EVQLVESGGGLVQPGGSLRLSCSASGFTFSSFGMHWVRQAPGKGLEWVAYISSGSSTIYYGDTVKGRFTISRDNAKNSLFLQMSSLRAEDTAVYYCAREGGYYYGRSYYTMDYWGQGTTVTVSSASTKGPSVFPLAPSSKSTSGGTAALGCLVKDYFPEPVTVSWNSGALTSGVHTFPAVLQSSGLYSLSSVVTVPSSSLGTQTYICNVNHKPSNTKVDKKVEPKSCDKTHTCPPCPAPELLGGPSVFLFPPKPKDTLMISRTPEVTCVVVDVSHEDPEVKFNWYVDGVEVHNAKTKPREEQYNSTYRVVSVLTVLHQDWLNGKEYKCKVSNKALPAPIEKTISKAKGQPREPQVYTLPPSREEMTKNQVSLTCLVKGFYPSDIAVEWESNGQPENNYKTTPPVLDSDGSFFLYSKLTVDKSRWQQGNVFSCSVMHEALHNHYTQKSLSLSPGGGGGSGGGGSQVQLVESGGGVVQPGRSLRLSCAASGYRSNGYYMGWFRQASGKEREGVAVIDSGGSTSYADSVKGRFTISLDNAKNTLYLQMNSLRAEDTAVYYCARGVKRYGDGGTDLYYYFDYWGQGTLVTVSS

SEQ ID NO: 8653 - protein, 581 aa, synthetic construct
EVQLVESGGGLVQPGGSLRLSCSASGFTFSSFGMHWVRQAPGKGLEWVAYISSGSSTIYYGDTVKGRFTISRDNAKNSLFLQMSSLRAEDTAVYYCAREGGYYYGRSYYTMDYWGQGTTVTVSSASTKGPSVFPLAPSSKSTSGGTAALGCLVKDYFPEPVTVSWNSGALTSGVHTFPAVLQSSGLYSLSSVVTVPSSSLGTQTYICNVNHKPSNTKVDKKVEPKSCDKTHTCPPCPAPELLGGPSVFLFPPKPKDTLMISRTPEVTCVVVDVSHEDPEVKFNWYVDGVEVHNAKTKPREEQYNSTYRVVSVLTVLHQDWLNGKEYKCKVSNKALPAPIEKTISKAKGQPREPQVYTLPPSREEMTKNQVSLTCLVKGFYPSDIAVEWESNGQPENNYKTTPPVLDSDGSFFLYSKLTVDKSRWQQGNVFSCSVMHEALHNHYTQKSLSLSPGGGGGSGGGGSQVQLVESGGGVVQPGRSLRLSCAASGYTLPMSTAWARQAPGKGLEWVAAIASDGRTDYADSVKGRFTISRDNSKNTVYLQMNSLRAEDTAVYYCATLWWYGGRTFDSWGQGTLVTVSS

SEQ ID NO: 8654 - protein, 588 aa, synthetic construct
EVQLVESGGGLVQPGGSLRLSCSASGFTFSSFGMHWVRQAPGKGLEWVAYISSGSSTIYYGDTVKGRFTISRDNAKNSLFLQMSSLRAEDTAVYYCAREGGYYYGRSYYTMDYWGQGTTVTVSSASTKGPSVFPLAPSSKSTSGGTAALGCLVKDYFPEPVTVSWNSGALTSGVHTFPAVLQSSGLYSLSSVVTVPSSSLGTQTYICNVNHKPSNTKVDKKVEPKSCDKTHTCPPCPAPELLGGPSVFLFPPKPKDTLMISRTPEVTCVVVDVSHEDPEVKFNWYVDGVEVHNAKTKPREEQYNSTYRVVSVLTVLHQDWLNGKEYKCKVSNKALPAPIEKTISKAKGQPREPQVYTLPPSREEMTKNQVSLTCLVKGFYPSDIAVEWESNGQPENNYKTTPPVLDSDGSFFLYSKLTVDKSRWQQGNVFSCSVMHEALHNHYTQKSLSLSPGGGGGSGGGGSQVQLVESGGGVVQPGRSLRLSCAASGFTFDDFDMGWYRQAPGKDREGVAVIRSDGILAYSDSVKGRFTISRDNSKNTVYLQMNSLRAEDTAVYYCARSRSNYSSDAYAYYWFDVWGQGTLVTVSS

SEQ ID NO: 8655 - protein, 582 aa, synthetic construct
EVQLVESGGGLVQPGGSLRLSCSASGFTFSSFGMHWVRQAPGKGLEWVAYISSGSSTIYYGDTVKGRFTISRDNAKNSLFLQMSSLRAEDTAVYYCAREGGYYYGRSYYTMDYWGQGTTVTVSSASTKGPSVFPLAPSSKSTSGGTAALGCLVKDYFPEPVTVSWNSGALTSGVHTFPAVLQSSGLYSLSSVVTVPSSSLGTQTYICNVNHKPSNTKVDKKVEPKSCDKTHTCPPCPAPELLGGPSVFLFPPKPKDTLMISRTPEVTCVVVDVSHEDPEVKFNWYVDGVEVHNAKTKPREEQYNSTYRVVSVLTVLHQDWLNGKEYKCKVSNKALPAPIEKTISKAKGQPREPQVYTLPPSREEMTKNQVSLTCLVKGFYPSDIAVEWESNGQPENNYKTTPPVLDSDGSFFLYSKLTVDKSRWQQGNVFSCSVMHEALHNHYTQKSLSLSPGGGGGSGGGGSQVQLVESGGGVVQPGRSLRLSCAASGGFDDADAEWGWARQAPGKGLEWVAAIAGDGRTDYAGSVKGRFTISRDNSKNTVYLQMNSLRAEDTAVYYCAKNGQSGFSFDPWGQGTLVTVSS

SEQ ID NO: 8656 - protein, 585 aa, synthetic construct
EVQLVESGGGLVQPGGSLRLSCSASGFTFSSFGMHWVRQAPGKGLEWVAYISSGSSTIYYGDTVKGRFTISRDNAKNSLFLQMSSLRAEDTAVYYCAREGGYYYGRSYYTMDYWGQGTTVTVSSASTKGPSVFPLAPSSKSTSGGTAALGCLVKDYFPEPVTVSWNSGALTSGVHTFPAVLQSSGLYSLSSVVTVPSSSLGTQTYICNVNHKPSNTKVDKKVEPKSCDKTHTCPPCPAPELLGGPSVFLFPPKPKDTLMISRTPEVTCVVVDVSHEDPEVKFNWYVDGVEVHNAKTKPREEQYNSTYRVVSVLTVLHQDWLNGKEYKCKVSNKALPAPIEKTISKAKGQPREPQVYTLPPSREEMTKNQVSLTCLVKGFYPSDIAVEWESNGQPENNYKTTPPVLDSDGSFFLYSKLTVDKSRWQQGNVFSCSVMHEALHNHYTQKSLSLSPGGGGGSGGGGSQVQLVESGGGVVQPGRSLRLSCAASGYTLPMSTAWARQAPGKGLEWVAAIASDGRTDYADSVKGRFTISRDNSKNTVYLQMNSLRAEDTAVYYCASLSRGTYSSGWKWDDYWGQGTLVTVSS

SEQ ID NO: 8657 - protein, 584 aa, synthetic construct
EVQLVESGGGLVQPGGSLRLSCSASGFTFSSFGMHWVRQAPGKGLEWVAYISSGSSTIYYGDTVKGRFTISRDNAKNSLFLQMSSLRAEDTAVYYCAREGGYYYGRSYYTMDYWGQGTTVTVSSASTKGPSVFPLAPSSKSTSGGTAALGCLVKDYFPEPVTVSWNSGALTSGVHTFPAVLQSSGLYSLSSVVTVPSSSLGTQTYICNVNHKPSNTKVDKKVEPKSCDKTHTCPPCPAPELLGGPSVFLFPPKPKDTLMISRTPEVTCVVVDVSHEDPEVKFNWYVDGVEVHNAKTKPREEQYNSTYRVVSVLTVLHQDWLNGKEYKCKVSNKALPAPIEKTISKAKGQPREPQVYTLPPSREEMTKNQVSLTCLVKGFYPSDIAVEWESNGQPENNYKTTPPVLDSDGSFFLYSKLTVDKSRWQQGNVFSCSVMHEALHNHYTQKSLSLSPGGGGGSGGGGSQVQLVESGGGVVQPGRSLRLSCAASGFTFSSYAMSWFRQALGKDREGVAAIDSDGTTSYGESVKGRFTISRDNSKNTVYLQMNSLRAEDTAVYYCARAWGVGDDYYRMDYWGQGTLVTVSS

SEQ ID NO: 8658 - protein, 582 aa, synthetic construct
EVQLVESGGGLVQPGGSLRLSCSASGFTFSSFGMHWVRQAPGKGLEWVAYISSGSSTIYYGDTVKGRFTISRDNAKNSLFLQMSSLRAEDTAVYYCAREGGYYYGRSYYTMDYWGQGTTVTVSSASTKGPSVFPLAPSSKSTSGGTAALGCLVKDYFPEPVTVSWNSGALTSGVHTFPAVLQSSGLYSLSSVVTVPSSSLGTQTYICNVNHKPSNTKVDKKVEPKSCDKTHTCPPCPAPELLGGPSVFLFPPKPKDTLMISRTPEVTCVVVDVSHEDPEVKFNWYVDGVEVHNAKTKPREEQYNSTYRVVSVLTVLHQDWLNGKEYKCKVSNKALPAPIEKTISKAKGQPREPQVYTLPPSREEMTKNQVSLTCLVKGFYPSDIAVEWESNGQPENNYKTTPPVLDSDGSFFLYSKLTVDKSRWQQGNVFSCSVMHEALHNHYTQKSLSLSPGGGGGSGGGGSQVQLVESGGGVVQPGRSLRLSCAASGYTATNYAMGWVRRAPGKGEEWVATIDSDGRASYADSVKGRFTISADTSKNTAYLQMNSLRAEDTAVYYCGRLQYSSGWYSDYWGQGTLVTVSS

SEQ ID NO: 8659 - protein, 581 aa, synthetic construct
EVQLVESGGGLVQPGGSLRLSCSASGFTFSSFGMHWVRQAPGKGLEWVAYISSGSSTIYYGDTVKGRFTISRDNAKNSLFLQMSSLRAEDTAVYYCAREGGYYYGRSYYTMDYWGQGTTVTVSSASTKGPSVFPLAPSSKSTSGGTAALGCLVKDYFPEPVTVSWNSGALTSGVHTFPAVLQSSGLYSLSSVVTVPSSSLGTQTYICNVNHKPSNTKVDKKVEPKSCDKTHTCPPCPAPELLGGPSVFLFPPKPKDTLMISRTPEVTCVVVDVSHEDPEVKFNWYVDGVEVHNAKTKPREEQYNSTYRVVSVLTVLHQDWLNGKEYKCKVSNKALPAPIEKTISKAKGQPREPQVYTLPPSREEMTKNQVSLTCLVKGFYPSDIAVEWESNGQPENNYKTTPPVLDSDGSFFLYSKLTVDKSRWQQGNVFSCSVMHEALHNHYTQKSLSLSPGGGGGSGGGGSQVQLVESGGGVVQPGRSLRLSCAASGFSFDDLDMGWARQAPGKGLEWVATITNGDYTRYSDSVKGRFTISRDNSKNTLYLQMNSLRAEDTAVYYCARDLSGSLYFDYWGQGTLVTVSS

SEQ ID NO: 8660 - protein, 584 aa, synthetic construct
EVQLVESGGGLVQPGGSLRLSCSASGFTFSSFGMHWVRQAPGKGLEWVAYISSGSSTIYYGDTVKGRFTISRDNAKNSLFLQMSSLRAEDTAVYYCAREGGYYYGRSYYTMDYWGQGTTVTVSSASTKGPSVFPLAPSSKSTSGGTAALGCLVKDYFPEPVTVSWNSGALTSGVHTFPAVLQSSGLYSLSSVVTVPSSSLGTQTYICNVNHKPSNTKVDKKVEPKSCDKTHTCPPCPAPELLGGPSVFLFPPKPKDTLMISRTPEVTCVVVDVSHEDPEVKFNWYVDGVEVHNAKTKPREEQYNSTYRVVSVLTVLHQDWLNGKEYKCKVSNKALPAPIEKTISKAKGQPREPQVYTLPPSREEMTKNQVSLTCLVKGFYPSDIAVEWESNGQPENNYKTTPPVLDSDGSFFLYSKLTVDKSRWQQGNVFSCSVMHEALHNHYTQKSLSLSPGGGGGSGGGGSQVQLVESGGGVVQPGRSLRLSCAASGYTVSNNCMGWFRQAPGKERELVAVIGSDGHATYAASVEGRFTISRDNAKRMVYLQMNSLRAEDTAVYYCARAHPRGSGSYYFDYWGQGTLVTVSS

SEQ ID NO: 8661 - protein, 583 aa, synthetic construct
EVQLVESGGGLVQPGGSLRLSCSASGFTFSSFGMHWVRQAPGKGLEWVAYISSGSSTIYYGDTVKGRFTISRDNAKNSLFLQMSSLRAEDTAVYYCAREGGYYYGRSYYTMDYWGQGTTVTVSSASTKGPSVFPLAPSSKSTSGGTAALGCLVKDYFPEPVTVSWNSGALTSGVHTFPAVLQSSGLYSLSSVVTVPSSSLGTQTYICNVNHKPSNTKVDKKVEPKSCDKTHTCPPCPAPELLGGPSVFLFPPKPKDTLMISRTPEVTCVVVDVSHEDPEVKFNWYVDGVEVHNAKTKPREEQYNSTYRVVSVLTVLHQDWLNGKEYKCKVSNKALPAPIEKTISKAKGQPREPQVYTLPPSREEMTKNQVSLTCLVKGFYPSDIAVEWESNGQPENNYKTTPPVLDSDGSFFLYSKLTVDKSRWQQGNVFSCSVMHEALHNHYTQKSLSLSPGGGGGSGGGGSQVQLVESGGGVVQPGRSLRLSCAASGFRYNSYAMAWARQAPGKGEEWVAAIDGDGTTDYADSVKGRFTISADTSKNTVYLQMNSLRAEDTAVYYCATVKKFWNGYAFDSWGQGTLVTVSS

SEQ ID NO: 8662 - protein, 584 aa, synthetic construct
EVQLVESGGGLVQPGGSLRLSCSASGFTFSSFGMHWVRQAPGKGLEWVAYISSGSSTIYYGDTVKGRFTISRDNAKNSLFLQMSSLRAEDTAVYYCAREGGYYYGRSYYTMDYWGQGTTVTVSSASTKGPSVFPLAPSSKSTSGGTAALGCLVKDYFPEPVTVSWNSGALTSGVHTFPAVLQSSGLYSLSSVVTVPSSSLGTQTYICNVNHKPSNTKVDKKVEPKSCDKTHTCPPCPAPELLGGPSVFLFPPKPKDTLMISRTPEVTCVVVDVSHEDPEVKFNWYVDGVEVHNAKTKPREEQYNSTYRVVSVLTVLHQDWLNGKEYKCKVSNKALPAPIEKTISKAKGQPREPQVYTLPPSREEMTKNQVSLTCLVKGFYPSDIAVEWESNGQPENNYKTTPPVLDSDGSFFLYSKLTVDKSRWQQGNVFSCSVMHEALHNHYTQKSLSLSPGGGGGSGGGGSQVQLVESGGGVVQPGRSLRLSCAASGFPFGGYSVGWFRQAPGKEREGVAVIDRDGSTTYADSVKGRFTISRDNAKDTLYLQMNSLRAEDTAVYYCARGGRKGLGWYYFDYWGQGTLVTVSS

SEQ ID NO: 8663 - protein, 580 aa, synthetic construct
EVQLVESGGGLVQPGGSLRLSCSASGFTFSSFGMHWVRQAPGKGLEWVAYISSGSSTIYYGDTVKGRFTISRDNAKNSLFLQMSSLRAEDTAVYYCAREGGYYYGRSYYTMDYWGQGTTVTVSSASTKGPSVFPLAPSSKSTSGGTAALGCLVKDYFPEPVTVSWNSGALTSGVHTFPAVLQSSGLYSLSSVVTVPSSSLGTQTYICNVNHKPSNTKVDKKVEPKSCDKTHTCPPCPAPELLGGPSVFLFPPKPKDTLMISRTPEVTCVVVDVSHEDPEVKFNWYVDGVEVHNAKTKPREEQYNSTYRVVSVLTVLHQDWLNGKEYKCKVSNKALPAPIEKTISKAKGQPREPQVYTLPPSREEMTKNQVSLTCLVKGFYPSDIAVEWESNGQPENNYKTTPPVLDSDGSFFLYSKLTVDKSRWQQGNVFSCSVMHEALHNHYTQKSLSLSPGGGGGSGGGGSQVQLVESGGGVVQPGRSLRLSCAASGFSFSSYPMTWVRQAPGKGPEWVSMINRDGSTYYGDSVKGRFAISRDNAKNTLYLQMNSLRAEDTAVYYCARDGGSYDMDVWGQGTLVTVSS

SEQ ID NO: 8664 - protein, 579 aa, synthetic construct
EVQLVESGGGLVQPGGSLRLSCSASGFTFSSFGMHWVRQAPGKGLEWVAYISSGSSTIYYGDTVKGRFTISRDNAKNSLFLQMSSLRAEDTAVYYCAREGGYYYGRSYYTMDYWGQGTTVTVSSASTKGPSVFPLAPSSKSTSGGTAALGCLVKDYFPEPVTVSWNSGALTSGVHTFPAVLQSSGLYSLSSVVTVPSSSLGTQTYICNVNHKPSNTKVDKKVEPKSCDKTHTCPPCPAPELLGGPSVFLFPPKPKDTLMISRTPEVTCVVVDVSHEDPEVKFNWYVDGVEVHNAKTKPREEQYNSTYRVVSVLTVLHQDWLNGKEYKCKVSNKALPAPIEKTISKAKGQPREPQVYTLPPSREEMTKNQVSLTCLVKGFYPSDIAVEWESNGQPENNYKTTPPVLDSDGSFFLYSKLTVDKSRWQQGNVFSCSVMHEALHNHYTQKSLSLSPGGGGGSGGGGSQVQLVESGGGVVQPGRSLRLSCAASGYTLPMSTAWARQAPGKGLEWVAAIASDGRTDYADSVKGRFTISRDNSKNTVYLQMNSLRAEDTAVYYCATLSMARNSDYWGQGTLVTVSS

SEQ ID NO: 8665 - protein, 581 aa, synthetic construct
EVQLVESGGGLVQPGGSLRLSCSASGFTFSSFGMHWVRQAPGKGLEWVAYISSGSSTIYYGDTVKGRFTISRDNAKNSLFLQMSSLRAEDTAVYYCAREGGYYYGRSYYTMDYWGQGTTVTVSSASTKGPSVFPLAPSSKSTSGGTAALGCLVKDYFPEPVTVSWNSGALTSGVHTFPAVLQSSGLYSLSSVVTVPSSSLGTQTYICNVNHKPSNTKVDKKVEPKSCDKTHTCPPCPAPELLGGPSVFLFPPKPKDTLMISRTPEVTCVVVDVSHEDPEVKFNWYVDGVEVHNAKTKPREEQYNSTYRVVSVLTVLHQDWLNGKEYKCKVSNKALPAPIEKTISKAKGQPREPQVYTLPPSREEMTKNQVSLTCLVKGFYPSDIAVEWESNGQPENNYKTTPPVLDSDGSFFLYSKLTVDKSRWQQGNVFSCSVMHEALHNHYTQKSLSLSPGGGGGSGGGGSQVQLVESGGGVVQPGRSLRLSCAASGFTISGYTMHWFRQAPGKGLEWVASIDTGGDTTYLPSVKGRFTISRDNSKNTLYLQMNSLRAEDTAVYYCATDRNGGGAFDVWGQGTLVTVSS

SEQ ID NO: 8666 - protein, 579 aa, synthetic construct
EVQLVESGGGLVQPGGSLRLSCSASGFTFSSFGMHWVRQAPGKGLEWVAYISSGSSTIYYGDTVKGRFTISRDNAKNSLFLQMSSLRAEDTAVYYCAREGGYYYGRSYYTMDYWGQGTTVTVSSASTKGPSVFPLAPSSKSTSGGTAALGCLVKDYFPEPVTVSWNSGALTSGVHTFPAVLQSSGLYSLSSVVTVPSSSLGTQTYICNVNHKPSNTKVDKKVEPKSCDKTHTCPPCPAPELLGGPSVFLFPPKPKDTLMISRTPEVTCVVVDVSHEDPEVKFNWYVDGVEVHNAKTKPREEQYNSTYRVVSVLTVLHQDWLNGKEYKCKVSNKALPAPIEKTISKAKGQPREPQVYTLPPSREEMTKNQVSLTCLVKGFYPSDIAVEWESNGQPENNYKTTPPVLDSDGSFFLYSKLTVDKSRWQQGNVFSCSVMHEALHNHYTQKSLSLSPGGGGGSGGGGSQVQLVESGGGVVQPGRSLRLSCAASGFISTYYMSWVRQAPGKGPEWVSTTGADGTTYYADSVNGRFTVSQDNAKNTVYLQMNSLRAEDTAVYYCARYEDGPGFDIWGQGTLVTVSS

SEQ ID NO: 8667 - protein, 583 aa, synthetic construct
EVQLVESGGGLVQPGGSLRLSCSASGFTFSSFGMHWVRQAPGKGLEWVAYISSGSSTIYYGDTVKGRFTISRDNAKNSLFLQMSSLRAEDTAVYYCAREGGYYYGRSYYTMDYWGQGTTVTVSSASTKGPSVFPLAPSSKSTSGGTAALGCLVKDYFPEPVTVSWNSGALTSGVHTFPAVLQSSGLYSLSSVVTVPSSSLGTQTYICNVNHKPSNTKVDKKVEPKSCDKTHTCPPCPAPELLGGPSVFLFPPKPKDTLMISRTPEVTCVVVDVSHEDPEVKFNWYVDGVEVHNAKTKPREEQYNSTYRVVSVLTVLHQDWLNGKEYKCKVSNKALPAPIEKTISKAKGQPREPQVYTLPPSREEMTKNQVSLTCLVKGFYPSDIAVEWESNGQPENNYKTTPPVLDSDGSFFLYSKLTVDKSRWQQGNVFSCSVMHEALHNHYTQKSLSLSPGGGGGSGGGGSQVQLVESGGGVVQPGRSLRLSCAASGYTLPMSMGWYRQAPGKDREGVAAIAGDGRTDYADSVKGRFTISRDNSKNTLYLQMNSLRAEDTAVYYCARGADWNYGYWYFDLWGQGTLVTVSS

SEQ ID NO: 8668 - protein, 588 aa, synthetic construct
EVQLVESGGGLVQPGGSLRLSCSASGFTFSSFGMHWVRQAPGKGLEWVAYISSGSSTIYYGDTVKGRFTISRDNAKNSLFLQMSSLRAEDTAVYYCAREGGYYYGRSYYTMDYWGQGTTVTVSSASTKGPSVFPLAPSSKSTSGGTAALGCLVKDYFPEPVTVSWNSGALTSGVHTFPAVLQSSGLYSLSSVVTVPSSSLGTQTYICNVNHKPSNTKVDKKVEPKSCDKTHTCPPCPAPELLGGPSVFLFPPKPKDTLMISRTPEVTCVVVDVSHEDPEVKFNWYVDGVEVHNAKTKPREEQYNSTYRVVSVLTVLHQDWLNGKEYKCKVSNKALPAPIEKTISKAKGQPREPQVYTLPPSREEMTKNQVSLTCLVKGFYPSDIAVEWESNGQPENNYKTTPPVLDSDGSFFLYSKLTVDKSRWQQGNVFSCSVMHEALHNHYTQKSLSLSPGGGGGSGGGGSQVQLVESGGGVVQPGRSLRLSCAASGFPFGGYSVGWFRQAPGKEREGVAVIDRDGSTTYADSVKGRFTISRDNANDTLYLQMNSLRAEDTAVYYCAKSAKYYYEGSYYYVHFDYWGQGTLVTVSS

SEQ ID NO: 8669 - protein, 586 aa, synthetic construct
EVQLVESGGGLVQPGGSLRLSCSASGFTFSSFGMHWVRQAPGKGLEWVAYISSGSSTIYYGDTVKGRFTISRDNAKNSLFLQMSSLRAEDTAVYYCAREGGYYYGRSYYTMDYWGQGTTVTVSSASTKGPSVFPLAPSSKSTSGGTAALGCLVKDYFPEPVTVSWNSGALTSGVHTFPAVLQSSGLYSLSSVVTVPSSSLGTQTYICNVNHKPSNTKVDKKVEPKSCDKTHTCPPCPAPELLGGPSVFLFPPKPKDTLMISRTPEVTCVVVDVSHEDPEVKFNWYVDGVEVHNAKTKPREEQYNSTYRVVSVLTVLHQDWLNGKEYKCKVSNKALPAPIEKTISKAKGQPREPQVYTLPPSREEMTKNQVSLTCLVKGFYPSDIAVEWESNGQPENNYKTTPPVLDSDGSFFLYSKLTVDKSRWQQGNVFSCSVMHEALHNHYTQKSLSLSPGGGGGSGGGGSQVQLVESGGGVVQPGRSLRLSCAASGFTTTTYTMGWFRQAPGKGRELVAVIDSDGDTAYAESVEGRFTISRDNAKRMVYLQMNSLRAEDTAVYYCARDKGGYGDYPFFLFDYWGQGTLVTVSS

SEQ ID NO: 8670 - protein, 581 aa, synthetic construct
EVQLVESGGGLVQPGGSLRLSCSASGFTFSSFGMHWVRQAPGKGLEWVAYISSGSSTIYYGDTVKGRFTISRDNAKNSLFLQMSSLRAEDTAVYYCAREGGYYYGRSYYTMDYWGQGTTVTVSSASTKGPSVFPLAPSSKSTSGGTAALGCLVKDYFPEPVTVSWNSGALTSGVHTFPAVLQSSGLYSLSSVVTVPSSSLGTQTYICNVNHKPSNTKVDKKVEPKSCDKTHTCPPCPAPELLGGPSVFLFPPKPKDTLMISRTPEVTCVVVDVSHEDPEVKFNWYVDGVEVHNAKTKPREEQYNSTYRVVSVLTVLHQDWLNGKEYKCKVSNKALPAPIEKTISKAKGQPREPQVYTLPPSREEMTKNQVSLTCLVKGFYPSDIAVEWESNGQPENNYKTTPPVLDSDGSFFLYSKLTVDKSRWQQGNVFSCSVMHEALHNHYTQKSLSLSPGGGGGSGGGGSQVQLVESGGGVVQPGRSLRLSCAASGFTFSSYAMSWFRQAPGKGRELVAAIDSDGSTSYADSVEGRFTISRDNAKRMVYLQMNSLRAEDTAVYYCARVDFYYYYMDVWGQGTLVTVSS

SEQ ID NO: 8671 - protein, 579 aa, synthetic construct
EVQLVESGGGLVQPGGSLRLSCSASGFTFSSFGMHWVRQAPGKGLEWVAYISSGSSTIYYGDTVKGRFTISRDNAKNSLFLQMSSLRAEDTAVYYCAREGGYYYGRSYYTMDYWGQGTTVTVSSASTKGPSVFPLAPSSKSTSGGTAALGCLVKDYFPEPVTVSWNSGALTSGVHTFPAVLQSSGLYSLSSVVTVPSSSLGTQTYICNVNHKPSNTKVDKKVEPKSCDKTHTCPPCPAPELLGGPSVFLFPPKPKDTLMISRTPEVTCVVVDVSHEDPEVKFNWYVDGVEVHNAKTKPREEQYNSTYRVVSVLTVLHQDWLNGKEYKCKVSNKALPAPIEKTISKAKGQPREPQVYTLPPSREEMTKNQVSLTCLVKGFYPSDIAVEWESNGQPENNYKTTPPVLDSDGSFFLYSKLTVDKSRWQQGNVFSCSVMHEALHNHYTQKSLSLSPGGGGGSGGGGSQVQLVESGGGVVQPGRSLRLSCAASGATSNTYYMGWFRQAPGKEREGVATIRRDDLTAYTDSVKGRFTISRDNTKNTLYLQMNSLRAEDTAVYYCARLDSNGYSYWGQGTLVTVSS

SEQ ID NO: 8672 - protein, 582 aa, synthetic construct
EVQLVESGGGLVQPGGSLRLSCSASGFTFSSFGMHWVRQAPGKGLEWVAYISSGSSTIYYGDTVKGRFTISRDNAKNSLFLQMSSLRAEDTAVYYCAREGGYYYGRSYYTMDYWGQGTTVTVSSASTKGPSVFPLAPSSKSTSGGTAALGCLVKDYFPEPVTVSWNSGALTSGVHTFPAVLQSSGLYSLSSVVTVPSSSLGTQTYICNVNHKPSNTKVDKKVEPKSCDKTHTCPPCPAPELLGGPSVFLFPPKPKDTLMISRTPEVTCVVVDVSHEDPEVKFNWYVDGVEVHNAKTKPREEQYNSTYRVVSVLTVLHQDWLNGKEYKCKVSNKALPAPIEKTISKAKGQPREPQVYTLPPSREEMTKNQVSLTCLVKGFYPSDIAVEWESNGQPENNYKTTPPVLDSDGSFFLYSKLTVDKSRWQQGNVFSCSVMHEALHNHYTQKSLSLSPGGGGGSGGGGSQVQLVESGGGVVQPGRSLRLSCAASGRSNENYFLAWYRQAPGKDREGVAVIYSDGKTVYADSVKGRFTISRDNSKNTLYLQMNSLRAEDTAVYYCTEYGFKNGYAFDAWGQGTLVTVSS

SEQ ID NO: 8673 - protein, 580 aa, synthetic construct
EVQLVESGGGLVQPGGSLRLSCSASGFTFSSFGMHWVRQAPGKGLEWVAYISSGSSTIYYGDTVKGRFTISRDNAKNSLFLQMSSLRAEDTAVYYCAREGGYYYGRSYYTMDYWGQGTTVTVSSASTKGPSVFPLAPSSKSTSGGTAALGCLVKDYFPEPVTVSWNSGALTSGVHTFPAVLQSSGLYSLSSVVTVPSSSLGTQTYICNVNHKPSNTKVDKKVEPKSCDKTHTCPPCPAPELLGGPSVFLFPPKPKDTLMISRTPEVTCVVVDVSHEDPEVKFNWYVDGVEVHNAKTKPREEQYNSTYRVVSVLTVLHQDWLNGKEYKCKVSNKALPAPIEKTISKAKGQPREPQVYTLPPSREEMTKNQVSLTCLVKGFYPSDIAVEWESNGQPENNYKTTPPVLDSDGSFFLYSKLTVDKSRWQQGNVFSCSVMHEALHNHYTQKSLSLSPGGGGGSGGGGSQVQLVESGGGVVQPGRSLRLSCAASGATSNTYYMGWFRLAPGKEREGVASIYTQDGRTAYADSVKGRFTISEDNAKNTVYLQMNSLRAEDTAVYYCARIDIDGYAYWGQGTLVTVSS

SEQ ID NO: 8674 - protein, 581 aa, synthetic construct
EVQLVESGGGLVQPGGSLRLSCSASGFTFSSFGMHWVRQAPGKGLEWVAYISSGSSTIYYGDTVKGRFTISRDNAKNSLFLQMSSLRAEDTAVYYCAREGGYYYGRSYYTMDYWGQGTTVTVSSASTKGPSVFPLAPSSKSTSGGTAALGCLVKDYFPEPVTVSWNSGALTSGVHTFPAVLQSSGLYSLSSVVTVPSSSLGTQTYICNVNHKPSNTKVDKKVEPKSCDKTHTCPPCPAPELLGGPSVFLFPPKPKDTLMISRTPEVTCVVVDVSHEDPEVKFNWYVDGVEVHNAKTKPREEQYNSTYRVVSVLTVLHQDWLNGKEYKCKVSNKALPAPIEKTISKAKGQPREPQVYTLPPSREEMTKNQVSLTCLVKGFYPSDIAVEWESNGQPENNYKTTPPVLDSDGSFFLYSKLTVDKSRWQQGNVFSCSVMHEALHNHYTQKSLSLSPGGGGGSGGGGSQVQLVESGGGVVQPGRSLRLSCAASGSSDEIYAMAWFRQAPGKGRELVAAIENDGTTTYAHSVKGRFTISADTSKNTAYLQMNSLRAEDTAVYYCARDSTSWWYFDLWGQGTLVTVSS

SEQ ID NO: 8675 - protein, 580 aa, synthetic construct
EVQLVESGGGLVQPGGSLRLSCSASGFTFSSFGMHWVRQAPGKGLEWVAYISSGSSTIYYGDTVKGRFTISRDNAKNSLFLQMSSLRAEDTAVYYCAREGGYYYGRSYYTMDYWGQGTTVTVSSASTKGPSVFPLAPSSKSTSGGTAALGCLVKDYFPEPVTVSWNSGALTSGVHTFPAVLQSSGLYSLSSVVTVPSSSLGTQTYICNVNHKPSNTKVDKKVEPKSCDKTHTCPPCPAPELLGGPSVFLFPPKPKDTLMISRTPEVTCVVVDVSHEDPEVKFNWYVDGVEVHNAKTKPREEQYNSTYRVVSVLTVLHQDWLNGKEYKCKVSNKALPAPIEKTISKAKGQPREPQVYTLPPSREEMTKNQVSLTCLVKGFYPSDIAVEWESNGQPENNYKTTPPVLDSDGSFFLYSKLTVDKSRWQQGNVFSCSVMHEALHNHYTQKSLSLSPGGGGGSGGGGSQVQLVESGGGVVQPGRSLRLSCAASGPSASAKAMAWFRQSVGKEREGIAAIRHDGGETWYAASVKGRFTISRDNAKNTLYLQMNSLRAEDTAVYYCVRDHGGARDIWGQGTLVTVSS

SEQ ID NO: 8676 - protein, 581 aa, synthetic construct
EVQLVESGGGLVQPGGSLRLSCSASGFTFSSFGMHWVRQAPGKGLEWVAYISSGSSTIYYGDTVKGRFTISRDNAKNSLFLQMSSLRAEDTAVYYCAREGGYYYGRSYYTMDYWGQGTTVTVSSASTKGPSVFPLAPSSKSTSGGTAALGCLVKDYFPEPVTVSWNSGALTSGVHTFPAVLQSSGLYSLSSVVTVPSSSLGTQTYICNVNHKPSNTKVDKKVEPKSCDKTHTCPPCPAPELLGGPSVFLFPPKPKDTLMISRTPEVTCVVVDVSHEDPEVKFNWYVDGVEVHNAKTKPREEQYNSTYRVVSVLTVLHQDWLNGKEYKCKVSNKALPAPIEKTISKAKGQPREPQVYTLPPSREEMTKNQVSLTCLVKGFYPSDIAVEWESNGQPENNYKTTPPVLDSDGSFFLYSKLTVDKSRWQQGNVFSCSVMHEALHNHYTQKSLSLSPGGGGGSGGGGSQVQLVESGGGVVQPGRSLRLSCAASGLSVSDSSMAWFRQRPGQEREGIAAIDTGDGSTYYLNSVEGRFTISHDNAKNTLYLQMNSLRAEDTAVYYCVRQQRDGLVNFWGQGTLVTVSS

SEQ ID NO: 8677 - protein, 582 aa, synthetic construct
EVQLVESGGGLVQPGGSLRLSCSASGFTFSSFGMHWVRQAPGKGLEWVAYISSGSSTIYYGDTVKGRFTISRDNAKNSLFLQMSSLRAEDTAVYYCAREGGYYYGRSYYTMDYWGQGTTVTVSSASTKGPSVFPLAPSSKSTSGGTAALGCLVKDYFPEPVTVSWNSGALTSGVHTFPAVLQSSGLYSLSSVVTVPSSSLGTQTYICNVNHKPSNTKVDKKVEPKSCDKTHTCPPCPAPELLGGPSVFLFPPKPKDTLMISRTPEVTCVVVDVSHEDPEVKFNWYVDGVEVHNAKTKPREEQYNSTYRVVSVLTVLHQDWLNGKEYKCKVSNKALPAPIEKTISKAKGQPREPQVYTLPPSREEMTKNQVSLTCLVKGFYPSDIAVEWESNGQPENNYKTTPPVLDSDGSFFLYSKLTVDKSRWQQGNVFSCSVMHEALHNHYTQKSLSLSPGGGGGSGGGGSQVQLVESGGGVVQPGRSLRLSCAASGFTVGARAMAWYRQAPGKDREGVAAIDSDGIASYADSVKGRFTISRDNAKNTLYLQMNSLRAEDTAVYYCARVSGSYGDYFDYWGQGTLVTVSS

SEQ ID NO: 8678 - protein, 579 aa, synthetic construct
EVQLVESGGGLVQPGGSLRLSCSASGFTFSSFGMHWVRQAPGKGLEWVAYISSGSSTIYYGDTVKGRFTISRDNAKNSLFLQMSSLRAEDTAVYYCAREGGYYYGRSYYTMDYWGQGTTVTVSSASTKGPSVFPLAPSSKSTSGGTAALGCLVKDYFPEPVTVSWNSGALTSGVHTFPAVLQSSGLYSLSSVVTVPSSSLGTQTYICNVNHKPSNTKVDKKVEPKSCDKTHTCPPCPAPELLGGPSVFLFPPKPKDTLMISRTPEVTCVVVDVSHEDPEVKFNWYVDGVEVHNAKTKPREEQYNSTYRVVSVLTVLHQDWLNGKEYKCKVSNKALPAPIEKTISKAKGQPREPQVYTLPPSREEMTKNQVSLTCLVKGFYPSDIAVEWESNGQPENNYKTTPPVLDSDGSFFLYSKLTVDKSRWQQGNVFSCSVMHEALHNHYTQKSLSLSPGGGGGSGGGGSQVQLVESGGGVVQPGRSLRLSCAASGYTFDESDMGWFRQAPGKGRELVSTISPDGTTYYADSVEGRFTISRDNAKRMVYLQMNSLRAEDTAVYYCARWRRSWFDTWGQGTLVTVSS

SEQ ID NO: 8679 - protein, 581 aa, synthetic construct
EVQLVESGGGLVQPGGSLRLSCSASGFTFSSFGMHWVRQAPGKGLEWVAYISSGSSTIYYGDTVKGRFTISRDNAKNSLFLQMSSLRAEDTAVYYCAREGGYYYGRSYYTMDYWGQGTTVTVSSASTKGPSVFPLAPSSKSTSGGTAALGCLVKDYFPEPVTVSWNSGALTSGVHTFPAVLQSSGLYSLSSVVTVPSSSLGTQTYICNVNHKPSNTKVDKKVEPKSCDKTHTCPPCPAPELLGGPSVFLFPPKPKDTLMISRTPEVTCVVVDVSHEDPEVKFNWYVDGVEVHNAKTKPREEQYNSTYRVVSVLTVLHQDWLNGKEYKCKVSNKALPAPIEKTISKAKGQPREPQVYTLPPSREEMTKNQVSLTCLVKGFYPSDIAVEWESNGQPENNYKTTPPVLDSDGSFFLYSKLTVDKSRWQQGNVFSCSVMHEALHNHYTQKSLSLSPGGGGGSGGGGSQVQLVESGGGVVQPGRSLRLSCAASGYTVATYFIGWFRQAPGKAREGVATITSDGRTKYADSVKGRFTISRDNAKNTVYLQMNSLRAEDTAVYYCASRSIAAAGEGYWGQGTLVTVSS

SEQ ID NO: 8680 - protein, 579 aa, synthetic construct
EVQLVESGGGLVQPGGSLRLSCSASGFTFSSFGMHWVRQAPGKGLEWVAYISSGSSTIYYGDTVKGRFTISRDNAKNSLFLQMSSLRAEDTAVYYCAREGGYYYGRSYYTMDYWGQGTTVTVSSASTKGPSVFPLAPSSKSTSGGTAALGCLVKDYFPEPVTVSWNSGALTSGVHTFPAVLQSSGLYSLSSVVTVPSSSLGTQTYICNVNHKPSNTKVDKKVEPKSCDKTHTCPPCPAPELLGGPSVFLFPPKPKDTLMISRTPEVTCVVVDVSHEDPEVKFNWYVDGVEVHNAKTKPREEQYNSTYRVVSVLTVLHQDWLNGKEYKCKVSNKALPAPIEKTISKAKGQPREPQVYTLPPSREEMTKNQVSLTCLVKGFYPSDIAVEWESNGQPENNYKTTPPVLDSDGSFFLYSKLTVDKSRWQQGNVFSCSVMHEALHNHYTQKSLSLSPGGGGGSGGGGSQVQLVESGGGVVQPGRSLRLSCAASGYPSCMGWARQAPGKGLEWVACIERRGRIHYAASVKGRFTISRDNSKNTLYLQMNSLRAEDTAVYYCASQDSSSYDAFDIWGQGTLVTVSS

SEQ ID NO: 8681 - protein, 580 aa, synthetic construct
EVQLVESGGGLVQPGGSLRLSCSASGFTFSSFGMHWVRQAPGKGLEWVAYISSGSSTIYYGDTVKGRFTISRDNAKNSLFLQMSSLRAEDTAVYYCAREGGYYYGRSYYTMDYWGQGTTVTVSSASTKGPSVFPLAPSSKSTSGGTAALGCLVKDYFPEPVTVSWNSGALTSGVHTFPAVLQSSGLYSLSSVVTVPSSSLGTQTYICNVNHKPSNTKVDKKVEPKSCDKTHTCPPCPAPELLGGPSVFLFPPKPKDTLMISRTPEVTCVVVDVSHEDPEVKFNWYVDGVEVHNAKTKPREEQYNSTYRVVSVLTVLHQDWLNGKEYKCKVSNKALPAPIEKTISKAKGQPREPQVYTLPPSREEMTKNQVSLTCLVKGFYPSDIAVEWESNGQPENNYKTTPPVLDSDGSFFLYSKLTVDKSRWQQGNVFSCSVMHEALHNHYTQKSLSLSPGGGGGSGGGGSQVQLVESGGGVVQPGRSLRLSCAASGGAYRKYYMGWFRQAPGKGRELVAAIESDGTTDYADSVEGRFTISRDNAKRMVYLQMNSLRAEDTAVYYCASVIGGNSEDYWGQGTLVTVSS

SEQ ID NO: 8682 - protein, 588 aa, synthetic construct
EVQLVESGGGLVQPGGSLRLSCSASGFTFSSFGMHWVRQAPGKGLEWVAYISSGSSTIYYGDTVKGRFTISRDNAKNSLFLQMSSLRAEDTAVYYCAREGGYYYGRSYYTMDYWGQGTTVTVSSASTKGPSVFPLAPSSKSTSGGTAALGCLVKDYFPEPVTVSWNSGALTSGVHTFPAVLQSSGLYSLSSVVTVPSSSLGTQTYICNVNHKPSNTKVDKKVEPKSCDKTHTCPPCPAPELLGGPSVFLFPPKPKDTLMISRTPEVTCVVVDVSHEDPEVKFNWYVDGVEVHNAKTKPREEQYNSTYRVVSVLTVLHQDWLNGKEYKCKVSNKALPAPIEKTISKAKGQPREPQVYTLPPSREEMTKNQVSLTCLVKGFYPSDIAVEWESNGQPENNYKTTPPVLDSDGSFFLYSKLTVDKSRWQQGNVFSCSVMHEALHNHYTQKSLSLSPGGGGGSGGGGSQVQLVESGGGVVQPGRSLRLSCAASGDANEFEWIGWYRQAPGKGRELVARIGSSGPRYADSVEGRFTISRDNSKNTLYLQMNSLRAEDTAVYYCAATHCSFLTTSVAGCTDDKYWGQGTLVTVSS

SEQ ID NO: 8683 - protein, 582 aa, synthetic construct
EVQLVESGGGLVQPGGSLRLSCSASGFTFSSFGMHWVRQAPGKGLEWVAYISSGSSTIYYGDTVKGRFTISRDNAKNSLFLQMSSLRAEDTAVYYCAREGGYYYGRSYYTMDYWGQGTTVTVSSASTKGPSVFPLAPSSKSTSGGTAALGCLVKDYFPEPVTVSWNSGALTSGVHTFPAVLQSSGLYSLSSVVTVPSSSLGTQTYICNVNHKPSNTKVDKKVEPKSCDKTHTCPPCPAPELLGGPSVFLFPPKPKDTLMISRTPEVTCVVVDVSHEDPEVKFNWYVDGVEVHNAKTKPREEQYNSTYRVVSVLTVLHQDWLNGKEYKCKVSNKALPAPIEKTISKAKGQPREPQVYTLPPSREEMTKNQVSLTCLVKGFYPSDIAVEWESNGQPENNYKTTPPVLDSDGSFFLYSKLTVDKSRWQQGNVFSCSVMHEALHNHYTQKSLSLSPGGGGGSGGGGSQVQLVESGGGVVQPGRSLRLSCAASGFTLGTNCMAWFRQAPGKERERVASIGSDGRTYYADSVKGRFTISRDNSKNTLYLQMNSLRAEDTAVYYCARAPGIQLWKFDYWGQGTLVTVSS

SEQ ID NO: 8684 - protein, 582 aa, synthetic construct
EVQLVESGGGLVQPGGSLRLSCSASGFTFSSFGMHWVRQAPGKGLEWVAYISSGSSTIYYGDTVKGRFTISRDNAKNSLFLQMSSLRAEDTAVYYCAREGGYYYGRSYYTMDYWGQGTTVTVSSASTKGPSVFPLAPSSKSTSGGTAALGCLVKDYFPEPVTVSWNSGALTSGVHTFPAVLQSSGLYSLSSVVTVPSSSLGTQTYICNVNHKPSNTKVDKKVEPKSCDKTHTCPPCPAPELLGGPSVFLFPPKPKDTLMISRTPEVTCVVVDVSHEDPEVKFNWYVDGVEVHNAKTKPREEQYNSTYRVVSVLTVLHQDWLNGKEYKCKVSNKALPAPIEKTISKAKGQPREPQVYTLPPSREEMTKNQVSLTCLVKGFYPSDIAVEWESNGQPENNYKTTPPVLDSDGSFFLYSKLTVDKSRWQQGNVFSCSVMHEALHNHYTQKSLSLSPGGGGGSGGGGSQVQLVESGGGVVQPGRSLRLSCAASGFTNSKTYLGWVRRAPGKGLEWVAAIAPSTGSTYYDDSVKGRFTISRDNSKNTLYLQMNSLRAEDTAVYYCASQGSSWYENDYWGQGTLVTVSS

SEQ ID NO: 8685 - protein, 582 aa, synthetic construct
EVQLVESGGGLVQPGGSLRLSCSASGFTFSSFGMHWVRQAPGKGLEWVAYISSGSSTIYYGDTVKGRFTISRDNAKNSLFLQMSSLRAEDTAVYYCAREGGYYYGRSYYTMDYWGQGTTVTVSSASTKGPSVFPLAPSSKSTSGGTAALGCLVKDYFPEPVTVSWNSGALTSGVHTFPAVLQSSGLYSLSSVVTVPSSSLGTQTYICNVNHKPSNTKVDKKVEPKSCDKTHTCPPCPAPELLGGPSVFLFPPKPKDTLMISRTPEVTCVVVDVSHEDPEVKFNWYVDGVEVHNAKTKPREEQYNSTYRVVSVLTVLHQDWLNGKEYKCKVSNKALPAPIEKTISKAKGQPREPQVYTLPPSREEMTKNQVSLTCLVKGFYPSDIAVEWESNGQPENNYKTTPPVLDSDGSFFLYSKLTVDKSRWQQGNVFSCSVMHEALHNHYTQKSLSLSPGGGGGSGGGGSQVQLVESGGGVVQPGRSLRLSCAASGFRFDDYAMGWFRQAPGKEREGVAGYKSDGSTTYADSVKGRFTISRDNSKNTLYLQMNSLRAEDTAVYYCASRALYGGKPFVIWGQGTLVTVSS

SEQ ID NO: 8686 - protein, 590 aa, synthetic construct
EVQLVESGGGLVQPGGSLRLSCSASGFTFSSFGMHWVRQAPGKGLEWVAYISSGSSTIYYGDTVKGRFTISRDNAKNSLFLQMSSLRAEDTAVYYCAREGGYYYGRSYYTMDYWGQGTTVTVSSASTKGPSVFPLAPSSKSTSGGTAALGCLVKDYFPEPVTVSWNSGALTSGVHTFPAVLQSSGLYSLSSVVTVPSSSLGTQTYICNVNHKPSNTKVDKKVEPKSCDKTHTCPPCPAPELLGGPSVFLFPPKPKDTLMISRTPEVTCVVVDVSHEDPEVKFNWYVDGVEVHNAKTKPREEQYNSTYRVVSVLTVLHQDWLNGKEYKCKVSNKALPAPIEKTISKAKGQPREPQVYTLPPSREEMTKNQVSLTCLVKGFYPSDIAVEWESNGQPENNYKTTPPVLDSDGSFFLYSKLTVDKSRWQQGNVFSCSVMHEALHNHYTQKSLSLSPGGGGGSGGGGSQVQLVESGGGVVQPGRSLRLSCAASGSPDRRACMGWYRQAPGKERERVAEIDTDGNTSYADSVKGRFTISRDNSKNTVYLQMNSLRAEDTAVYYCALQPGCPPATLFYWRKTGFGNWGQGTLVTVSS

SEQ ID NO: 8687 - protein, 585 aa, synthetic construct
EVQLVESGGGLVQPGGSLRLSCSASGFTFSSFGMHWVRQAPGKGLEWVAYISSGSSTIYYGDTVKGRFTISRDNAKNSLFLQMSSLRAEDTAVYYCAREGGYYYGRSYYTMDYWGQGTTVTVSSASTKGPSVFPLAPSSKSTSGGTAALGCLVKDYFPEPVTVSWNSGALTSGVHTFPAVLQSSGLYSLSSVVTVPSSSLGTQTYICNVNHKPSNTKVDKKVEPKSCDKTHTCPPCPAPELLGGPSVFLFPPKPKDTLMISRTPEVTCVVVDVSHEDPEVKFNWYVDGVEVHNAKTKPREEQYNSTYRVVSVLTVLHQDWLNGKEYKCKVSNKALPAPIEKTISKAKGQPREPQVYTLPPSREEMTKNQVSLTCLVKGFYPSDIAVEWESNGQPENNYKTTPPVLDSDGSFFLYSKLTVDKSRWQQGNVFSCSVMHEALHNHYTQKSLSLSPGGGGGSGGGGSQVQLVESGGGVVQPGRSLRLSCAASGFTFDDTDMGWFRQAPGKERERVSTINSDGGTTYYADSVKGRFTISRDNSKNTLYLQMNSLRAEDTAVYYCARARVTDAGWQYFDYWGQGTLVTVSS

SEQ ID NO: 8688 - protein, 580 aa, synthetic construct
EVQLVESGGGLVQPGGSLRLSCSASGFTFSSFGMHWVRQAPGKGLEWVAYISSGSSTIYYGDTVKGRFTISRDNAKNSLFLQMSSLRAEDTAVYYCAREGGYYYGRSYYTMDYWGQGTTVTVSSASTKGPSVFPLAPSSKSTSGGTAALGCLVKDYFPEPVTVSWNSGALTSGVHTFPAVLQSSGLYSLSSVVTVPSSSLGTQTYICNVNHKPSNTKVDKKVEPKSCDKTHTCPPCPAPELLGGPSVFLFPPKPKDTLMISRTPEVTCVVVDVSHEDPEVKFNWYVDGVEVHNAKTKPREEQYNSTYRVVSVLTVLHQDWLNGKEYKCKVSNKALPAPIEKTISKAKGQPREPQVYTLPPSREEMTKNQVSLTCLVKGFYPSDIAVEWESNGQPENNYKTTPPVLDSDGSFFLYSKLTVDKSRWQQGNVFSCSVMHEALHNHYTQKSLSLSPGGGGGSGGGGSQVQLVESGGGVVQPGRSLRLSCAASGFTFSDYYIGWFRQAPGKERERVAQIDKNGVTNYADAVKGRFTISRDNSKNTLYLQMNSLRAEDTAVYYCAGVDAFNYMEVWGQGTLVTVSS

SEQ ID NO: 8689 - protein, 584 aa, synthetic construct
EVQLVESGGGLVQPGGSLRLSCSASGFTFSSFGMHWVRQAPGKGLEWVAYISSGSSTIYYGDTVKGRFTISRDNAKNSLFLQMSSLRAEDTAVYYCAREGGYYYGRSYYTMDYWGQGTTVTVSSASTKGPSVFPLAPSSKSTSGGTAALGCLVKDYFPEPVTVSWNSGALTSGVHTFPAVLQSSGLYSLSSVVTVPSSSLGTQTYICNVNHKPSNTKVDKKVEPKSCDKTHTCPPCPAPELLGGPSVFLFPPKPKDTLMISRTPEVTCVVVDVSHEDPEVKFNWYVDGVEVHNAKTKPREEQYNSTYRVVSVLTVLHQDWLNGKEYKCKVSNKALPAPIEKTISKAKGQPREPQVYTLPPSREEMTKNQVSLTCLVKGFYPSDIAVEWESNGQPENNYKTTPPVLDSDGSFFLYSKLTVDKSRWQQGNVFSCSVMHEALHNHYTQKSLSLSPGGGGGSGGGGSQVQLVESGGGVVQPGRSLRLSCAASGDFNDARAEWGWFRQAPGKGRELVASLASDGSTIYANPVEGRFTISRDNAKNTLYLQMNSLRAEDTAVYYCARSGASSSWYWFDYWGQGTLVTVSS

SEQ ID NO: 8690 - protein, 581 aa, synthetic construct
EVQLVESGGGLVQPGGSLRLSCSASGFTFSSFGMHWVRQAPGKGLEWVAYISSGSSTIYYGDTVKGRFTISRDNAKNSLFLQMSSLRAEDTAVYYCAREGGYYYGRSYYTMDYWGQGTTVTVSSASTKGPSVFPLAPSSKSTSGGTAALGCLVKDYFPEPVTVSWNSGALTSGVHTFPAVLQSSGLYSLSSVVTVPSSSLGTQTYICNVNHKPSNTKVDKKVEPKSCDKTHTCPPCPAPELLGGPSVFLFPPKPKDTLMISRTPEVTCVVVDVSHEDPEVKFNWYVDGVEVHNAKTKPREEQYNSTYRVVSVLTVLHQDWLNGKEYKCKVSNKALPAPIEKTISKAKGQPREPQVYTLPPSREEMTKNQVSLTCLVKGFYPSDIAVEWESNGQPENNYKTTPPVLDSDGSFFLYSKLTVDKSRWQQGNVFSCSVMHEALHNHYTQKSLSLSPGGGGGSGGGGSQVQLVESGGGVVQPGRSLRLSCAASGSIHNRRHMGWFRQAAGKEREGVAAIDIAGNTRISDSVKGRFTISHDKDENRLYLQMNSLRAEDTAVYYCAIQSSDGRGTVYWGQGTLVTVSS

SEQ ID NO: 8691 - protein, 582 aa, synthetic construct
EVQLVESGGGLVQPGGSLRLSCSASGFTFSSFGMHWVRQAPGKGLEWVAYISSGSSTIYYGDTVKGRFTISRDNAKNSLFLQMSSLRAEDTAVYYCAREGGYYYGRSYYTMDYWGQGTTVTVSSASTKGPSVFPLAPSSKSTSGGTAALGCLVKDYFPEPVTVSWNSGALTSGVHTFPAVLQSSGLYSLSSVVTVPSSSLGTQTYICNVNHKPSNTKVDKKVEPKSCDKTHTCPPCPAPELLGGPSVFLFPPKPKDTLMISRTPEVTCVVVDVSHEDPEVKFNWYVDGVEVHNAKTKPREEQYNSTYRVVSVLTVLHQDWLNGKEYKCKVSNKALPAPIEKTISKAKGQPREPQVYTLPPSREEMTKNQVSLTCLVKGFYPSDIAVEWESNGQPENNYKTTPPVLDSDGSFFLYSKLTVDKSRWQQGNVFSCSVMHEALHNHYTQKSLSLSPGGGGGSGGGGSQVQLVESGGGVVQPGRSLRLSCAASGRRGNNYSMAWYRQAPGKDREGVAAIDSDGDTSYADPVKGRFTISRDNSKNTLYLQMNSLRAEDTAVYYCAVATGEYRRYFDVWGQGTLVTVSS

SEQ ID NO: 8692 - protein, 581 aa, synthetic construct
EVQLVESGGGLVQPGGSLRLSCSASGFTFSSFGMHWVRQAPGKGLEWVAYISSGSSTIYYGDTVKGRFTISRDNAKNSLFLQMSSLRAEDTAVYYCAREGGYYYGRSYYTMDYWGQGTTVTVSSASTKGPSVFPLAPSSKSTSGGTAALGCLVKDYFPEPVTVSWNSGALTSGVHTFPAVLQSSGLYSLSSVVTVPSSSLGTQTYICNVNHKPSNTKVDKKVEPKSCDKTHTCPPCPAPELLGGPSVFLFPPKPKDTLMISRTPEVTCVVVDVSHEDPEVKFNWYVDGVEVHNAKTKPREEQYNSTYRVVSVLTVLHQDWLNGKEYKCKVSNKALPAPIEKTISKAKGQPREPQVYTLPPSREEMTKNQVSLTCLVKGFYPSDIAVEWESNGQPENNYKTTPPVLDSDGSFFLYSKLTVDKSRWQQGNVFSCSVMHEALHNHYTQKSLSLSPGGGGGSGGGGSQVQLVESGGGVVQPGRSLRLSCAASGFAFTKYHMSWFRQAPGKGRELVSHISAGGRTYYSDSVEGRFTISRDNAKRMVYLQMNSLRAEDTAVYYCVKESRPHSYGDHWGQGTLVTVSS

SEQ ID NO: 8693 - protein, 580 aa, synthetic construct
EVQLVESGGGLVQPGGSLRLSCSASGFTFSSFGMHWVRQAPGKGLEWVAYISSGSSTIYYGDTVKGRFTISRDNAKNSLFLQMSSLRAEDTAVYYCAREGGYYYGRSYYTMDYWGQGTTVTVSSASTKGPSVFPLAPSSKSTSGGTAALGCLVKDYFPEPVTVSWNSGALTSGVHTFPAVLQSSGLYSLSSVVTVPSSSLGTQTYICNVNHKPSNTKVDKKVEPKSCDKTHTCPPCPAPELLGGPSVFLFPPKPKDTLMISRTPEVTCVVVDVSHEDPEVKFNWYVDGVEVHNAKTKPREEQYNSTYRVVSVLTVLHQDWLNGKEYKCKVSNKALPAPIEKTISKAKGQPREPQVYTLPPCREEMTKNQVSLWCLVKGFYPSDIAVEWESNGQPENNYKTTPPVLDSDGSFFLYSKLTVDKSRWQQGNVFSCSVMHEALHNHYTQKSLSLSPGGGGGSGGGGSQVQLVESGGGVVQPGRSLRLSCAASGFSFSNFGMSWVRQARGKGLEWVSSTGSDGTAYYADSVKGRFTISRDNAKNTLYLQMNSLRAEDTAVYYCARAPSRHGFDYWGQGTLVTVSS

SEQ ID NO: 8694 - protein, 580 aa, synthetic construct
EVQLVESGGGLVQPGGSLRLSCSASGFTFSSFGMHWVRQAPGKGLEWVAYISSGSSTIYYGDTVKGRFTISRDNAKNSLFLQMSSLRAEDTAVYYCAREGGYYYGRSYYTMDYWGQGTTVTVSSASTKGPSVFPLAPSSKSTSGGTAALGCLVKDYFPEPVTVSWNSGALTSGVHTFPAVLQSSGLYSLSSVVTVPSSSLGTQTYICNVNHKPSNTKVDKKVEPKSCDKTHTCPPCPAPELLGGPSVFLFPPKPKDTLMISRTPEVTCVVVDVSHEDPEVKFNWYVDGVEVHNAKTKPREEQYNSTYRVVSVLTVLHQDWLNGKEYKCKVSNKALPAPIEKTISKAKGQPREPQVYTLPPCREEMTKNQVSLWCLVKGFYPSDIAVEWESNGQPENNYKTTPPVLDSDGSFFLYSKLTVDKSRWQQGNVFSCSVMHEALHNHYTQKSLSLSPGGGGGSGGGGSQVQLVESGGGVVQPGRSLRLSCAASGFSFSNFGMSWVRQARGKGLEWVSSIGSDGRAYYADSVKGRFTISRDNAKNTLYLQMNSLRAEDTAVYYCARAPSRHGFDYWGQGTLVTVSS

SEQ ID NO: 8695 - protein, 580 aa, synthetic construct
EVQLVESGGGLVQPGGSLRLSCSASGFTFSSFGMHWVRQAPGKGLEWVAYISSGSSTIYYGDTVKGRFTISRDNAKNSLFLQMSSLRAEDTAVYYCAREGGYYYGRSYYTMDYWGQGTTVTVSSASTKGPSVFPLAPSSKSTSGGTAALGCLVKDYFPEPVTVSWNSGALTSGVHTFPAVLQSSGLYSLSSVVTVPSSSLGTQTYICNVNHKPSNTKVDKKVEPKSCDKTHTCPPCPAPELLGGPSVFLFPPKPKDTLMISRTPEVTCVVVDVSHEDPEVKFNWYVDGVEVHNAKTKPREEQYNSTYRVVSVLTVLHQDWLNGKEYKCKVSNKALPAPIEKTISKAKGQPREPQVYTLPPCREEMTKNQVSLWCLVKGFYPSDIAVEWESNGQPENNYKTTPPVLDSDGSFFLYSKLTVDKSRWQQGNVFSCSVMHEALHNHYTQKSLSLSPGGGGGSGGGGSQVQLVESGGGVVQPGRSLRLSCAASGFSFSNFGMSWVRQARGKGLEWVSSVGSDGTAYYADSVKGRFTISRDNAKNTLYLQMNSLRAEDTAVYYCARAPSRHGFDYWGQGTLVTVSS

SEQ ID NO: 8696 - protein, 580 aa, synthetic construct
EVQLVESGGGLVQPGGSLRLSCSASGFTFSSFGMHWVRQAPGKGLEWVAYISSGSSTIYYGDTVKGRFTISRDNAKNSLFLQMSSLRAEDTAVYYCAREGGYYYGRSYYTMDYWGQGTTVTVSSASTKGPSVFPLAPSSKSTSGGTAALGCLVKDYFPEPVTVSWNSGALTSGVHTFPAVLQSSGLYSLSSVVTVPSSSLGTQTYICNVNHKPSNTKVDKKVEPKSCDKTHTCPPCPAPELLGGPSVFLFPPKPKDTLMISRTPEVTCVVVDVSHEDPEVKFNWYVDGVEVHNAKTKPREEQYNSTYRVVSVLTVLHQDWLNGKEYKCKVSNKALPAPIEKTISKAKGQPREPQVYTLPPCREEMTKNQVSLWCLVKGFYPSDIAVEWESNGQPENNYKTTPPVLDSDGSFFLYSKLTVDKSRWQQGNVFSCSVMHEALHNHYTQKSLSLSPGGGGGSGGGGSQVQLVESGGGVVQPGRSLRLSCAASGFSFSNFGMSWVRQAPGKGLEWVSSTGSDGTAYYADSVKGRFTISRDNAKNTLHLQMNSLRAEDTAVYYCARAPSRHGFDYWGQGTLVTVSS

SEQ ID NO: 8697 - protein, 579 aa, synthetic construct
EVQLVESGGGLVQPGGSLRLSCSASGFTFSSFGMHWVRQAPGKGLEWVAYISSGSSTIYYGDTVKGRFTISRDNAKNSLFLQMSSLRAEDTAVYYCAREGGYYYGRSYYTMDYWGQGTTVTVSSASTKGPSVFPLAPSSKSTSGGTAALGCLVKDYFPEPVTVSWNSGALTSGVHTFPAVLQSSGLYSLSSVVTVPSSSLGTQTYICNVNHKPSNTKVDKKVEPKSCDKTHTCPPCPAPELLGGPSVFLFPPKPKDTLMISRTPEVTCVVVDVSHEDPEVKFNWYVDGVEVHNAKTKPREEQYNSTYRVVSVLTVLHQDWLNGKEYKCKVSNKALPAPIEKTISKAKGQPREPQVYTLPPCREEMTKNQVSLWCLVKGFYPSDIAVEWESNGQPENNYKTTPPVLDSDGSFFLYSKLTVDKSRWQQGNVFSCSVMHEALHNHYTQKSLSLSPGGGGGSGGGGSQVQLVESGGGVVQPGRSLRLSCAASGFAVDASDMGWFRQAPGKGRELVSSISSDNDTYYADSVEGRFTISRDNAKRMVYLQMNSLRAEDTAVYYCASGRFLEPDYWGQGTLVTVSS

SEQ ID NO: 8698 - protein, 580 aa, synthetic construct
EVQLVESGGGLVQPGGSLRLSCSASGFTFSSFGMHWVRQAPGKGLEWVAYISSGSSTIYYGDTVKGRFTISRDNAKNSLFLQMSSLRAEDTAVYYCAREGGYYYGRSYYTMDYWGQGTTVTVSSASTKGPSVFPLAPSSKSTSGGTAALGCLVKDYFPEPVTVSWNSGALTSGVHTFPAVLQSSGLYSLSSVVTVPSSSLGTQTYICNVNHKPSNTKVDKKVEPKSCDKTHTCPPCPAPELLGGPSVFLFPPKPKDTLMISRTPEVTCVVVDVSHEDPEVKFNWYVDGVEVHNAKTKPREEQYNSTYRVVSVLTVLHQDWLNGKEYKCKVSNKALPAPIEKTISKAKGQPREPQVYTLPPCREEMTKNQVSLWCLVKGFYPSDIAVEWESNGQPENNYKTTPPVLDSDGSFFLYSKLTVDKSRWQQGNVFSCSVMHEALHNHYTQKSLSLSPGGGGGSGGGGSQVQLVESGGGVVQPGRSLRLSCAASGFTFDDSDMGWFRQAPGKGRELVAAINTGGGKTYYAATVEGRFTISRDNAKRMVYLQMNSLRAEDTAVYYCASGRFLEPDYWGQGTLVTVSS

SEQ ID NO: 8699 - protein, 581 aa, synthetic construct
EVQLVESGGGLVQPGGSLRLSCSASGFTFSSFGMHWVRQAPGKGLEWVAYISSGSSTIYYGDTVKGRFTISRDNAKNSLFLQMSSLRAEDTAVYYCAREGGYYYGRSYYTMDYWGQGTTVTVSSASTKGPSVFPLAPSSKSTSGGTAALGCLVKDYFPEPVTVSWNSGALTSGVHTFPAVLQSSGLYSLSSVVTVPSSSLGTQTYICNVNHKPSNTKVDKKVEPKSCDKTHTCPPCPAPELLGGPSVFLFPPKPKDTLMISRTPEVTCVVVDVSHEDPEVKFNWYVDGVEVHNAKTKPREEQYNSTYRVVSVLTVLHQDWLNGKEYKCKVSNKALPAPIEKTISKAKGQPREPQVYTLPPCREEMTKNQVSLWCLVKGFYPSDIAVEWESNGQPENNYKTTPPVLDSDGSFFLYSKLTVDKSRWQQGNVFSCSVMHEALHNHYTQKSLSLSPGGGGGSGGGGSQVQLVESGGGVVQPGRSLRLSCAASGLTFDDSDMGWFRQAPGKERERVSTISSDGTPHYDDSVKGRFTISRDNSKNTLYLQMNSLRAEDTAVYYCARRDGGSWNFDYWGQGTLVTVSS

SEQ ID NO: 8700 - protein, 580 aa, synthetic construct
EVQLVESGGGLVQPGGSLRLSCSASGFTFSSFGMHWVRQAPGKGLEWVAYISSGSSTIYYGDTVKGRFTISRDNAKNSLFLQMSSLRAEDTAVYYCAREGGYYYGRSYYTMDYWGQGTTVTVSSASTKGPSVFPLAPSSKSTSGGTAALGCLVKDYFPEPVTVSWNSGALTSGVHTFPAVLQSSGLYSLSSVVTVPSSSLGTQTYICNVNHKPSNTKVDKKVEPKSCDKTHTCPPCPAPELLGGPSVFLFPPKPKDTLMISRTPEVTCVVVDVSHEDPEVKFNWYVDGVEVHNAKTKPREEQYNSTYRVVSVLTVLHQDWLNGKEYKCKVSNKALPAPIEKTISKAKGQPREPQVYTLPPCREEMTKNQVSLWCLVKGFYPSDIAVEWESNGQPENNYKTTPPVLDSDGSFFLYSKLTVDKSRWQQGNVFSCSVMHEALHNHYTQKSLSLSPGGGGGSGGGGSQVQLVESGGGVVQPGRSLRLSCAASGFTFDGSDIAWVRRAPGKGEEWVSTISSDGTVYYSDPVKGRFTISADTSKNTAYLQMNSLRAEDTAVYYCAISSWYGDFDYWGQGTLVTVSS

SEQ ID NO: 8701 - protein, 584 aa, synthetic construct
EVQLVESGGGLVQPGGSLRLSCSASGFTFSSFGMHWVRQAPGKGLEWVAYISSGSSTIYYGDTVKGRFTISRDNAKNSLFLQMSSLRAEDTAVYYCAREGGYYYGRSYYTMDYWGQGTTVTVSSASTKGPSVFPLAPSSKSTSGGTAALGCLVKDYFPEPVTVSWNSGALTSGVHTFPAVLQSSGLYSLSSVVTVPSSSLGTQTYICNVNHKPSNTKVDKKVEPKSCDKTHTCPPCPAPELLGGPSVFLFPPKPKDTLMISRTPEVTCVVVDVSHEDPEVKFNWYVDGVEVHNAKTKPREEQYNSTYRVVSVLTVLHQDWLNGKEYKCKVSNKALPAPIEKTISKAKGQPREPQVYTLPPCREEMTKNQVSLWCLVKGFYPSDIAVEWESNGQPENNYKTTPPVLDSDGSFFLYSKLTVDKSRWQQGNVFSCSVMHEALHNHYTQKSLSLSPGGGGGSGGGGSQVQLVESGGGVVQPGRSLRLSCAASGHILNYWYMGWVRRAPGKGEEWVAGISPGGTVTVYADSVKGRFTISRDNSKNTLYLQMNSLRAEDTAVYYCARGGQGGDAWAFDYWGQGTLVTVSS

SEQ ID NO: 8702 - protein, 583 aa, synthetic construct
EVQLVESGGGLVQPGGSLRLSCSASGFTFSSFGMHWVRQAPGKGLEWVAYISSGSSTIYYGDTVKGRFTISRDNAKNSLFLQMSSLRAEDTAVYYCAREGGYYYGRSYYTMDYWGQGTTVTVSSASTKGPSVFPLAPSSKSTSGGTAALGCLVKDYFPEPVTVSWNSGALTSGVHTFPAVLQSSGLYSLSSVVTVPSSSLGTQTYICNVNHKPSNTKVDKKVEPKSCDKTHTCPPCPAPELLGGPSVFLFPPKPKDTLMISRTPEVTCVVVDVSHEDPEVKFNWYVDGVEVHNAKTKPREEQYNSTYRVVSVLTVLHQDWLNGKEYKCKVSNKALPAPIEKTISKAKGQPREPQVYTLPPCREEMTKNQVSLWCLVKGFYPSDIAVEWESNGQPENNYKTTPPVLDSDGSFFLYSKLTVDKSRWQQGNVFSCSVMHEALHNHYTQKSLSLSPGGGGGSGGGGSQVQLVESGGGVVQPGRSLRLSCAASGFGVASSDMGWFRQAPGKGRELVASINTDGSTIYAESVEGRFTISRDNAKRMVYLQMNSLRAEDTAVYYCAAYDTSAYHSPFDYWGQGTLVTVSS

SEQ ID NO: 8703 - protein, 582 aa, synthetic construct
EVQLVESGGGLVQPGGSLRLSCSASGFTFSSFGMHWVRQAPGKGLEWVAYISSGSSTIYYGDTVKGRFTISRDNAKNSLFLQMSSLRAEDTAVYYCAREGGYYYGRSYYTMDYWGQGTTVTVSSASTKGPSVFPLAPSSKSTSGGTAALGCLVKDYFPEPVTVSWNSGALTSGVHTFPAVLQSSGLYSLSSVVTVPSSSLGTQTYICNVNHKPSNTKVDKKVEPKSCDKTHTCPPCPAPELLGGPSVFLFPPKPKDTLMISRTPEVTCVVVDVSHEDPEVKFNWYVDGVEVHNAKTKPREEQYNSTYRVVSVLTVLHQDWLNGKEYKCKVSNKALPAPIEKTISKAKGQPREPQVYTLPPCREEMTKNQVSLWCLVKGFYPSDIAVEWESNGQPENNYKTTPPVLDSDGSFFLYSKLTVDKSRWQQGNVFSCSVMHEALHNHYTQKSLSLSPGGGGGSGGGGSQVQLVESGGGVVQPGRSLRLSCAASGYTFRSASMGWVRRAPGKGEEWVAVIDSEGHTIYADSVKGRFTISADTSKNTAYLQMNSLRAEDTAVYYCAKDIYGDYGGPDYWGQGTLVTVSS

SEQ ID NO: 8704 - protein, 582 aa, synthetic construct
EVQLVESGGGLVQPGGSLRLSCSASGFTFSSFGMHWVRQAPGKGLEWVAYISSGSSTIYYGDTVKGRFTISRDNAKNSLFLQMSSLRAEDTAVYYCAREGGYYYGRSYYTMDYWGQGTTVTVSSASTKGPSVFPLAPSSKSTSGGTAALGCLVKDYFPEPVTVSWNSGALTSGVHTFPAVLQSSGLYSLSSVVTVPSSSLGTQTYICNVNHKPSNTKVDKKVEPKSCDKTHTCPPCPAPELLGGPSVFLFPPKPKDTLMISRTPEVTCVVVDVSHEDPEVKFNWYVDGVEVHNAKTKPREEQYNSTYRVVSVLTVLHQDWLNGKEYKCKVSNKALPAPIEKTISKAKGQPREPQVYTLPPCREEMTKNQVSLWCLVKGFYPSDIAVEWESNGQPENNYKTTPPVLDSDGSFFLYSKLTVDKSRWQQGNVFSCSVMHEALHNHYTQKSLSLSPGGGGGSGGGGSQVQLVESGGGVVQPGRSLRLSCAASGTRRPNYVTWFRQAPLNERQVVAGIDSAGTTTYADSVKGRFTISQDNAKNTVYLQMNSLRAEDTAVYYCASGISSSSFYPFDSWGQGTLVTVSS

SEQ ID NO: 8705 - protein, 581 aa, synthetic construct
EVQLVESGGGLVQPGGSLRLSCSASGFTFSSFGMHWVRQAPGKGLEWVAYISSGSSTIYYGDTVKGRFTISRDNAKNSLFLQMSSLRAEDTAVYYCAREGGYYYGRSYYTMDYWGQGTTVTVSSASTKGPSVFPLAPSSKSTSGGTAALGCLVKDYFPEPVTVSWNSGALTSGVHTFPAVLQSSGLYSLSSVVTVPSSSLGTQTYICNVNHKPSNTKVDKKVEPKSCDKTHTCPPCPAPELLGGPSVFLFPPKPKDTLMISRTPEVTCVVVDVSHEDPEVKFNWYVDGVEVHNAKTKPREEQYNSTYRVVSVLTVLHQDWLNGKEYKCKVSNKALPAPIEKTISKAKGQPREPQVYTLPPCREEMTKNQVSLWCLVKGFYPSDIAVEWESNGQPENNYKTTPPVLDSDGSFFLYSKLTVDKSRWQQGNVFSCSVMHEALHNHYTQKSLSLSPGGGGGSGGGGSQVQLVESGGGVVQPGRSLRLSCAASGFNFDDSDMGWFRQAPGKGRELVSSIASDGATYYADSVEGRFTISRDNAKRMVYLQMNSLRAEDTAVYYCARDSPSLRAFDSWGQGTLVTVSS

SEQ ID NO: 8706 - protein, 582 aa, synthetic construct
EVQLVESGGGLVQPGGSLRLSCSASGFTFSSFGMHWVRQAPGKGLEWVAYISSGSSTIYYGDTVKGRFTISRDNAKNSLFLQMSSLRAEDTAVYYCAREGGYYYGRSYYTMDYWGQGTTVTVSSASTKGPSVFPLAPSSKSTSGGTAALGCLVKDYFPEPVTVSWNSGALTSGVHTFPAVLQSSGLYSLSSVVTVPSSSLGTQTYICNVNHKPSNTKVDKKVEPKSCDKTHTCPPCPAPELLGGPSVFLFPPKPKDTLMISRTPEVTCVVVDVSHEDPEVKFNWYVDGVEVHNAKTKPREEQYNSTYRVVSVLTVLHQDWLNGKEYKCKVSNKALPAPIEKTISKAKGQPREPQVYTLPPCREEMTKNQVSLWCLVKGFYPSDIAVEWESNGQPENNYKTTPPVLDSDGSFFLYSKLTVDKSRWQQGNVFSCSVMHEALHNHYTQKSLSLSPGGGGGSGGGGSQVQLVESGGGVVQPGRSLRLSCAASGTTYSRQYCMGWARQAPGKGLEWVSCIDDDGNTYYADSVKGRFTISRDNSKNTLYLQMNSLRAEDTAVYYCARDPGLSGDFDYWGQGTLVTVSS

SEQ ID NO: 8707 - protein, 583 aa, synthetic construct
EVQLVESGGGLVQPGGSLRLSCSASGFTFSSFGMHWVRQAPGKGLEWVAYISSGSSTIYYGDTVKGRFTISRDNAKNSLFLQMSSLRAEDTAVYYCAREGGYYYGRSYYTMDYWGQGTTVTVSSASTKGPSVFPLAPSSKSTSGGTAALGCLVKDYFPEPVTVSWNSGALTSGVHTFPAVLQSSGLYSLSSVVTVPSSSLGTQTYICNVNHKPSNTKVDKKVEPKSCDKTHTCPPCPAPELLGGPSVFLFPPKPKDTLMISRTPEVTCVVVDVSHEDPEVKFNWYVDGVEVHNAKTKPREEQYNSTYRVVSVLTVLHQDWLNGKEYKCKVSNKALPAPIEKTISKAKGQPREPQVYTLPPCREEMTKNQVSLWCLVKGFYPSDIAVEWESNGQPENNYKTTPPVLDSDGSFFLYSKLTVDKSRWQQGNVFSCSVMHEALHNHYTQKSLSLSPGGGGGSGGGGSQVQLVESGGGVVQPGRSLRLSCAASGITYRGPCMGWYRQAPGKGLEWVATLDSDGSTTYADSVKGRFTISRDNSKNTLYLQMNSLRAEDTAVYYCAMYMTGGGGVAFDYWGQGTLVTVSS

SEQ ID NO: 8708 - protein, 582 aa, synthetic construct
EVQLVESGGGLVQPGGSLRLSCSASGFTFSSFGMHWVRQAPGKGLEWVAYISSGSSTIYYGDTVKGRFTISRDNAKNSLFLQMSSLRAEDTAVYYCAREGGYYYGRSYYTMDYWGQGTTVTVSSASTKGPSVFPLAPSSKSTSGGTAALGCLVKDYFPEPVTVSWNSGALTSGVHTFPAVLQSSGLYSLSSVVTVPSSSLGTQTYICNVNHKPSNTKVDKKVEPKSCDKTHTCPPCPAPELLGGPSVFLFPPKPKDTLMISRTPEVTCVVVDVSHEDPEVKFNWYVDGVEVHNAKTKPREEQYNSTYRVVSVLTVLHQDWLNGKEYKCKVSNKALPAPIEKTISKAKGQPREPQVYTLPPCREEMTKNQVSLWCLVKGFYPSDIAVEWESNGQPENNYKTTPPVLDSDGSFFLYSKLTVDKSRWQQGNVFSCSVMHEALHNHYTQKSLSLSPGGGGGSGGGGSQVQLVESGGGVVQPGRSLRLSCAASGFTFSKYAMNWARQAPGKGLEWVAFIDTAGRTIYADSVKGRFTISRDNSKNTLYLQMNSLRAEDTAVYYCAPSYGDSGDYFDYWGQGTLVTVSS

SEQ ID NO: 8709 - protein, 584 aa, synthetic construct
EVQLVESGGGLVQPGGSLRLSCSASGFTFSSFGMHWVRQAPGKGLEWVAYISSGSSTIYYGDTVKGRFTISRDNAKNSLFLQMSSLRAEDTAVYYCAREGGYYYGRSYYTMDYWGQGTTVTVSSASTKGPSVFPLAPSSKSTSGGTAALGCLVKDYFPEPVTVSWNSGALTSGVHTFPAVLQSSGLYSLSSVVTVPSSSLGTQTYICNVNHKPSNTKVDKKVEPKSCDKTHTCPPCPAPELLGGPSVFLFPPKPKDTLMISRTPEVTCVVVDVSHEDPEVKFNWYVDGVEVHNAKTKPREEQYNSTYRVVSVLTVLHQDWLNGKEYKCKVSNKALPAPIEKTISKAKGQPREPQVYTLPPCREEMTKNQVSLWCLVKGFYPSDIAVEWESNGQPENNYKTTPPVLDSDGSFFLYSKLTVDKSRWQQGNVFSCSVMHEALHNHYTQKSLSLSPGGGGGSGGGGSQVQLVESGGGVVQPGRSLRLSCAASGFPFSSYGMGWFRQAPGKEREGVAGVNTGGRTSYAESVKGRFTISRDNTRNTLYLQMNSLRAEDTAVYYCARIRAAGTVAPYFDYWGQGTLVTVSS

SEQ ID NO: 8710 - protein, 581 aa, synthetic construct
EVQLVESGGGLVQPGGSLRLSCSASGFTFSSFGMHWVRQAPGKGLEWVAYISSGSSTIYYGDTVKGRFTISRDNAKNSLFLQMSSLRAEDTAVYYCAREGGYYYGRSYYTMDYWGQGTTVTVSSASTKGPSVFPLAPSSKSTSGGTAALGCLVKDYFPEPVTVSWNSGALTSGVHTFPAVLQSSGLYSLSSVVTVPSSSLGTQTYICNVNHKPSNTKVDKKVEPKSCDKTHTCPPCPAPELLGGPSVFLFPPKPKDTLMISRTPEVTCVVVDVSHEDPEVKFNWYVDGVEVHNAKTKPREEQYNSTYRVVSVLTVLHQDWLNGKEYKCKVSNKALPAPIEKTISKAKGQPREPQVYTLPPCREEMTKNQVSLWCLVKGFYPSDIAVEWESNGQPENNYKTTPPVLDSDGSFFLYSKLTVDKSRWQQGNVFSCSVMHEALHNHYTQKSLSLSPGGGGGSGGGGSQVQLVESGGGVVQPGRSLRLSCAASGYVAGYVGWYRQAPGKDREGVAAIASDGMTAYAHSVKGRFTISRDNSKNTLYLQMNSLRAEDTAVYYCASGYCSGSGCYFDSWGQGTLVTVSS

SEQ ID NO: 8711 - protein, 579 aa, synthetic construct
EVQLVESGGGLVQPGGSLRLSCSASGFTFSSFGMHWVRQAPGKGLEWVAYISSGSSTIYYGDTVKGRFTISRDNAKNSLFLQMSSLRAEDTAVYYCAREGGYYYGRSYYTMDYWGQGTTVTVSSASTKGPSVFPLAPSSKSTSGGTAALGCLVKDYFPEPVTVSWNSGALTSGVHTFPAVLQSSGLYSLSSVVTVPSSSLGTQTYICNVNHKPSNTKVDKKVEPKSCDKTHTCPPCPAPELLGGPSVFLFPPKPKDTLMISRTPEVTCVVVDVSHEDPEVKFNWYVDGVEVHNAKTKPREEQYNSTYRVVSVLTVLHQDWLNGKEYKCKVSNKALPAPIEKTISKAKGQPREPQVYTLPPCREEMTKNQVSLWCLVKGFYPSDIAVEWESNGQPENNYKTTPPVLDSDGSFFLYSKLTVDKSRWQQGNVFSCSVMHEALHNHYTQKSLSLSPGGGGGSGGGGSQVQLVESGGGVVQPGRSLRLSCAASGFRYNSYAMAWARQAPGKGLEWVAAIAGDGRTDYADSVKGRFTISRDNSKNTLYLQMNSLRAEDTAVYYCAREDTAAFDYWGQGTLVTVSS

SEQ ID NO: 8712 - protein, 589 aa, synthetic construct
EVQLVESGGGLVQPGGSLRLSCSASGFTFSSFGMHWVRQAPGKGLEWVAYISSGSSTIYYGDTVKGRFTISRDNAKNSLFLQMSSLRAEDTAVYYCAREGGYYYGRSYYTMDYWGQGTTVTVSSASTKGPSVFPLAPSSKSTSGGTAALGCLVKDYFPEPVTVSWNSGALTSGVHTFPAVLQSSGLYSLSSVVTVPSSSLGTQTYICNVNHKPSNTKVDKKVEPKSCDKTHTCPPCPAPELLGGPSVFLFPPKPKDTLMISRTPEVTCVVVDVSHEDPEVKFNWYVDGVEVHNAKTKPREEQYNSTYRVVSVLTVLHQDWLNGKEYKCKVSNKALPAPIEKTISKAKGQPREPQVYTLPPCREEMTKNQVSLWCLVKGFYPSDIAVEWESNGQPENNYKTTPPVLDSDGSFFLYSKLTVDKSRWQQGNVFSCSVMHEALHNHYTQKSLSLSPGGGGGSGGGGSQVQLVESGGGVVQPGRSLRLSCAASGYRSNGYYMGWFRQASGKEREGVAVIDSGGSTSYADSVKGRFTISLDNAKNTLYLQMNSLRAEDTAVYYCARGVKRYGDGGTDLYYYFDYWGQGTLVTVSS

SEQ ID NO: 8713 - protein, 581 aa, synthetic construct
EVQLVESGGGLVQPGGSLRLSCSASGFTFSSFGMHWVRQAPGKGLEWVAYISSGSSTIYYGDTVKGRFTISRDNAKNSLFLQMSSLRAEDTAVYYCAREGGYYYGRSYYTMDYWGQGTTVTVSSASTKGPSVFPLAPSSKSTSGGTAALGCLVKDYFPEPVTVSWNSGALTSGVHTFPAVLQSSGLYSLSSVVTVPSSSLGTQTYICNVNHKPSNTKVDKKVEPKSCDKTHTCPPCPAPELLGGPSVFLFPPKPKDTLMISRTPEVTCVVVDVSHEDPEVKFNWYVDGVEVHNAKTKPREEQYNSTYRVVSVLTVLHQDWLNGKEYKCKVSNKALPAPIEKTISKAKGQPREPQVYTLPPCREEMTKNQVSLWCLVKGFYPSDIAVEWESNGQPENNYKTTPPVLDSDGSFFLYSKLTVDKSRWQQGNVFSCSVMHEALHNHYTQKSLSLSPGGGGGSGGGGSQVQLVESGGGVVQPGRSLRLSCAASGYTLPMSTAWARQAPGKGLEWVAAIASDGRTDYADSVKGRFTISRDNSKNTVYLQMNSLRAEDTAVYYCATLWWYGGRTFDSWGQGTLVTVSS

SEQ ID NO: 8714 - protein, 588 aa, synthetic construct
EVQLVESGGGLVQPGGSLRLSCSASGFTFSSFGMHWVRQAPGKGLEWVAYISSGSSTIYYGDTVKGRFTISRDNAKNSLFLQMSSLRAEDTAVYYCAREGGYYYGRSYYTMDYWGQGTTVTVSSASTKGPSVFPLAPSSKSTSGGTAALGCLVKDYFPEPVTVSWNSGALTSGVHTFPAVLQSSGLYSLSSVVTVPSSSLGTQTYICNVNHKPSNTKVDKKVEPKSCDKTHTCPPCPAPELLGGPSVFLFPPKPKDTLMISRTPEVTCVVVDVSHEDPEVKFNWYVDGVEVHNAKTKPREEQYNSTYRVVSVLTVLHQDWLNGKEYKCKVSNKALPAPIEKTISKAKGQPREPQVYTLPPCREEMTKNQVSLWCLVKGFYPSDIAVEWESNGQPENNYKTTPPVLDSDGSFFLYSKLTVDKSRWQQGNVFSCSVMHEALHNHYTQKSLSLSPGGGGGSGGGGSQVQLVESGGGVVQPGRSLRLSCAASGFTFDDFDMGWYRQAPGKDREGVAVIRSDGILAYSDSVKGRFTISRDNSKNTVYLQMNSLRAEDTAVYYCARSRSNYSSDAYAYYWFDVWGQGTLVTVSS

SEQ ID NO: 8715 - protein, 582 aa, synthetic construct
EVQLVESGGGLVQPGGSLRLSCSASGFTFSSFGMHWVRQAPGKGLEWVAYISSGSSTIYYGDTVKGRFTISRDNAKNSLFLQMSSLRAEDTAVYYCAREGGYYYGRSYYTMDYWGQGTTVTVSSASTKGPSVFPLAPSSKSTSGGTAALGCLVKDYFPEPVTVSWNSGALTSGVHTFPAVLQSSGLYSLSSVVTVPSSSLGTQTYICNVNHKPSNTKVDKKVEPKSCDKTHTCPPCPAPELLGGPSVFLFPPKPKDTLMISRTPEVTCVVVDVSHEDPEVKFNWYVDGVEVHNAKTKPREEQYNSTYRVVSVLTVLHQDWLNGKEYKCKVSNKALPAPIEKTISKAKGQPREPQVYTLPPCREEMTKNQVSLWCLVKGFYPSDIAVEWESNGQPENNYKTTPPVLDSDGSFFLYSKLTVDKSRWQQGNVFSCSVMHEALHNHYTQKSLSLSPGGGGGSGGGGSQVQLVESGGGVVQPGRSLRLSCAASGGFDDADAEWGWARQAPGKGLEWVAAIAGDGRTDYAGSVKGRFTISRDNSKNTVYLQMNSLRAEDTAVYYCAKNGQSGFSFDPWGQGTLVTVSS

SEQ ID NO: 8716 - protein, 585 aa, synthetic construct
EVQLVESGGGLVQPGGSLRLSCSASGFTFSSFGMHWVRQAPGKGLEWVAYISSGSSTIYYGDTVKGRFTISRDNAKNSLFLQMSSLRAEDTAVYYCAREGGYYYGRSYYTMDYWGQGTTVTVSSASTKGPSVFPLAPSSKSTSGGTAALGCLVKDYFPEPVTVSWNSGALTSGVHTFPAVLQSSGLYSLSSVVTVPSSSLGTQTYICNVNHKPSNTKVDKKVEPKSCDKTHTCPPCPAPELLGGPSVFLFPPKPKDTLMISRTPEVTCVVVDVSHEDPEVKFNWYVDGVEVHNAKTKPREEQYNSTYRVVSVLTVLHQDWLNGKEYKCKVSNKALPAPIEKTISKAKGQPREPQVYTLPPCREEMTKNQVSLWCLVKGFYPSDIAVEWESNGQPENNYKTTPPVLDSDGSFFLYSKLTVDKSRWQQGNVFSCSVMHEALHNHYTQKSLSLSPGGGGGSGGGGSQVQLVESGGGVVQPGRSLRLSCAASGYTLPMSTAWARQAPGKGLEWVAAIASDGRTDYADSVKGRFTISRDNSKNTVYLQMNSLRAEDTAVYYCASLSRGTYSSGWKWDDYWGQGTLVTVSS

SEQ ID NO: 8717 - protein, 584 aa, synthetic construct
EVQLVESGGGLVQPGGSLRLSCSASGFTFSSFGMHWVRQAPGKGLEWVAYISSGSSTIYYGDTVKGRFTISRDNAKNSLFLQMSSLRAEDTAVYYCAREGGYYYGRSYYTMDYWGQGTTVTVSSASTKGPSVFPLAPSSKSTSGGTAALGCLVKDYFPEPVTVSWNSGALTSGVHTFPAVLQSSGLYSLSSVVTVPSSSLGTQTYICNVNHKPSNTKVDKKVEPKSCDKTHTCPPCPAPELLGGPSVFLFPPKPKDTLMISRTPEVTCVVVDVSHEDPEVKFNWYVDGVEVHNAKTKPREEQYNSTYRVVSVLTVLHQDWLNGKEYKCKVSNKALPAPIEKTISKAKGQPREPQVYTLPPCREEMTKNQVSLWCLVKGFYPSDIAVEWESNGQPENNYKTTPPVLDSDGSFFLYSKLTVDKSRWQQGNVFSCSVMHEALHNHYTQKSLSLSPGGGGGSGGGGSQVQLVESGGGVVQPGRSLRLSCAASGFTFSSYAMSWFRQALGKDREGVAAIDSDGTTSYGESVKGRFTISRDNSKNTVYLQMNSLRAEDTAVYYCARAWGVGDDYYRMDYWGQGTLVTVSS

SEQ ID NO: 8718 - protein, 582 aa, synthetic construct
EVQLVESGGGLVQPGGSLRLSCSASGFTFSSFGMHWVRQAPGKGLEWVAYISSGSSTIYYGDTVKGRFTISRDNAKNSLFLQMSSLRAEDTAVYYCAREGGYYYGRSYYTMDYWGQGTTVTVSSASTKGPSVFPLAPSSKSTSGGTAALGCLVKDYFPEPVTVSWNSGALTSGVHTFPAVLQSSGLYSLSSVVTVPSSSLGTQTYICNVNHKPSNTKVDKKVEPKSCDKTHTCPPCPAPELLGGPSVFLFPPKPKDTLMISRTPEVTCVVVDVSHEDPEVKFNWYVDGVEVHNAKTKPREEQYNSTYRVVSVLTVLHQDWLNGKEYKCKVSNKALPAPIEKTISKAKGQPREPQVYTLPPCREEMTKNQVSLWCLVKGFYPSDIAVEWESNGQPENNYKTTPPVLDSDGSFFLYSKLTVDKSRWQQGNVFSCSVMHEALHNHYTQKSLSLSPGGGGGSGGGGSQVQLVESGGGVVQPGRSLRLSCAASGYTATNYAMGWVRRAPGKGEEWVATIDSDGRASYADSVKGRFTISADTSKNTAYLQMNSLRAEDTAVYYCGRLQYSSGWYSDYWGQGTLVTVSS

SEQ ID NO: 8719 - protein, 581 aa, synthetic construct
EVQLVESGGGLVQPGGSLRLSCSASGFTFSSFGMHWVRQAPGKGLEWVAYISSGSSTIYYGDTVKGRFTISRDNAKNSLFLQMSSLRAEDTAVYYCAREGGYYYGRSYYTMDYWGQGTTVTVSSASTKGPSVFPLAPSSKSTSGGTAALGCLVKDYFPEPVTVSWNSGALTSGVHTFPAVLQSSGLYSLSSVVTVPSSSLGTQTYICNVNHKPSNTKVDKKVEPKSCDKTHTCPPCPAPELLGGPSVFLFPPKPKDTLMISRTPEVTCVVVDVSHEDPEVKFNWYVDGVEVHNAKTKPREEQYNSTYRVVSVLTVLHQDWLNGKEYKCKVSNKALPAPIEKTISKAKGQPREPQVYTLPPCREEMTKNQVSLWCLVKGFYPSDIAVEWESNGQPENNYKTTPPVLDSDGSFFLYSKLTVDKSRWQQGNVFSCSVMHEALHNHYTQKSLSLSPGGGGGSGGGGSQVQLVESGGGVVQPGRSLRLSCAASGFSFDDLDMGWARQAPGKGLEWVATITNGDYTRYSDSVKGRFTISRDNSKNTLYLQMNSLRAEDTAVYYCARDLSGSLYFDYWGQGTLVTVSS

SEQ ID NO: 8720 - protein, 584 aa, synthetic construct
EVQLVESGGGLVQPGGSLRLSCSASGFTFSSFGMHWVRQAPGKGLEWVAYISSGSSTIYYGDTVKGRFTISRDNAKNSLFLQMSSLRAEDTAVYYCAREGGYYYGRSYYTMDYWGQGTTVTVSSASTKGPSVFPLAPSSKSTSGGTAALGCLVKDYFPEPVTVSWNSGALTSGVHTFPAVLQSSGLYSLSSVVTVPSSSLGTQTYICNVNHKPSNTKVDKKVEPKSCDKTHTCPPCPAPELLGGPSVFLFPPKPKDTLMISRTPEVTCVVVDVSHEDPEVKFNWYVDGVEVHNAKTKPREEQYNSTYRVVSVLTVLHQDWLNGKEYKCKVSNKALPAPIEKTISKAKGQPREPQVYTLPPCREEMTKNQVSLWCLVKGFYPSDIAVEWESNGQPENNYKTTPPVLDSDGSFFLYSKLTVDKSRWQQGNVFSCSVMHEALHNHYTQKSLSLSPGGGGGSGGGGSQVQLVESGGGVVQPGRSLRLSCAASGYTVSNNCMGWFRQAPGKERELVAVIGSDGHATYAASVEGRFTISRDNAKRMVYLQMNSLRAEDTAVYYCARAHPRGSGSYYFDYWGQGTLVTVSS

SEQ ID NO: 8721 - protein, 583 aa, synthetic construct
EVQLVESGGGLVQPGGSLRLSCSASGFTFSSFGMHWVRQAPGKGLEWVAYISSGSSTIYYGDTVKGRFTISRDNAKNSLFLQMSSLRAEDTAVYYCAREGGYYYGRSYYTMDYWGQGTTVTVSSASTKGPSVFPLAPSSKSTSGGTAALGCLVKDYFPEPVTVSWNSGALTSGVHTFPAVLQSSGLYSLSSVVTVPSSSLGTQTYICNVNHKPSNTKVDKKVEPKSCDKTHTCPPCPAPELLGGPSVFLFPPKPKDTLMISRTPEVTCVVVDVSHEDPEVKFNWYVDGVEVHNAKTKPREEQYNSTYRVVSVLTVLHQDWLNGKEYKCKVSNKALPAPIEKTISKAKGQPREPQVYTLPPCREEMTKNQVSLWCLVKGFYPSDIAVEWESNGQPENNYKTTPPVLDSDGSFFLYSKLTVDKSRWQQGNVFSCSVMHEALHNHYTQKSLSLSPGGGGGSGGGGSQVQLVESGGGVVQPGRSLRLSCAASGFRYNSYAMAWARQAPGKGEEWVAAIDGDGTTDYADSVKGRFTISADTSKNTVYLQMNSLRAEDTAVYYCATVKKFWNGYAFDSWGQGTLVTVSS

SEQ ID NO: 8722 - protein, 584 aa, synthetic construct
EVQLVESGGGLVQPGGSLRLSCSASGFTFSSFGMHWVRQAPGKGLEWVAYISSGSSTIYYGDTVKGRFTISRDNAKNSLFLQMSSLRAEDTAVYYCAREGGYYYGRSYYTMDYWGQGTTVTVSSASTKGPSVFPLAPSSKSTSGGTAALGCLVKDYFPEPVTVSWNSGALTSGVHTFPAVLQSSGLYSLSSVVTVPSSSLGTQTYICNVNHKPSNTKVDKKVEPKSCDKTHTCPPCPAPELLGGPSVFLFPPKPKDTLMISRTPEVTCVVVDVSHEDPEVKFNWYVDGVEVHNAKTKPREEQYNSTYRVVSVLTVLHQDWLNGKEYKCKVSNKALPAPIEKTISKAKGQPREPQVYTLPPCREEMTKNQVSLWCLVKGFYPSDIAVEWESNGQPENNYKTTPPVLDSDGSFFLYSKLTVDKSRWQQGNVFSCSVMHEALHNHYTQKSLSLSPGGGGGSGGGGSQVQLVESGGGVVQPGRSLRLSCAASGFPFGGYSVGWFRQAPGKEREGVAVIDRDGSTTYADSVKGRFTISRDNAKDTLYLQMNSLRAEDTAVYYCARGGRKGLGWYYFDYWGQGTLVTVSS

SEQ ID NO: 8723 - protein, 580 aa, synthetic construct
EVQLVESGGGLVQPGGSLRLSCSASGFTFSSFGMHWVRQAPGKGLEWVAYISSGSSTIYYGDTVKGRFTISRDNAKNSLFLQMSSLRAEDTAVYYCAREGGYYYGRSYYTMDYWGQGTTVTVSSASTKGPSVFPLAPSSKSTSGGTAALGCLVKDYFPEPVTVSWNSGALTSGVHTFPAVLQSSGLYSLSSVVTVPSSSLGTQTYICNVNHKPSNTKVDKKVEPKSCDKTHTCPPCPAPELLGGPSVFLFPPKPKDTLMISRTPEVTCVVVDVSHEDPEVKFNWYVDGVEVHNAKTKPREEQYNSTYRVVSVLTVLHQDWLNGKEYKCKVSNKALPAPIEKTISKAKGQPREPQVYTLPPCREEMTKNQVSLWCLVKGFYPSDIAVEWESNGQPENNYKTTPPVLDSDGSFFLYSKLTVDKSRWQQGNVFSCSVMHEALHNHYTQKSLSLSPGGGGGSGGGGSQVQLVESGGGVVQPGRSLRLSCAASGFSFSSYPMTWVRQAPGKGPEWVSMINRDGSTYYGDSVKGRFAISRDNAKNTLYLQMNSLRAEDTAVYYCARDGGSYDMDVWGQGTLVTVSS

SEQ ID NO: 8724 - protein, 579 aa, synthetic construct
EVQLVESGGGLVQPGGSLRLSCSASGFTFSSFGMHWVRQAPGKGLEWVAYISSGSSTIYYGDTVKGRFTISRDNAKNSLFLQMSSLRAEDTAVYYCAREGGYYYGRSYYTMDYWGQGTTVTVSSASTKGPSVFPLAPSSKSTSGGTAALGCLVKDYFPEPVTVSWNSGALTSGVHTFPAVLQSSGLYSLSSVVTVPSSSLGTQTYICNVNHKPSNTKVDKKVEPKSCDKTHTCPPCPAPELLGGPSVFLFPPKPKDTLMISRTPEVTCVVVDVSHEDPEVKFNWYVDGVEVHNAKTKPREEQYNSTYRVVSVLTVLHQDWLNGKEYKCKVSNKALPAPIEKTISKAKGQPREPQVYTLPPCREEMTKNQVSLWCLVKGFYPSDIAVEWESNGQPENNYKTTPPVLDSDGSFFLYSKLTVDKSRWQQGNVFSCSVMHEALHNHYTQKSLSLSPGGGGGSGGGGSQVQLVESGGGVVQPGRSLRLSCAASGYTLPMSTAWARQAPGKGLEWVAAIASDGRTDYADSVKGRFTISRDNSKNTVYLQMNSLRAEDTAVYYCATLSMARNSDYWGQGTLVTVSS

SEQ ID NO: 8725 - protein, 581 aa, synthetic construct
EVQLVESGGGLVQPGGSLRLSCSASGFTFSSFGMHWVRQAPGKGLEWVAYISSGSSTIYYGDTVKGRFTISRDNAKNSLFLQMSSLRAEDTAVYYCAREGGYYYGRSYYTMDYWGQGTTVTVSSASTKGPSVFPLAPSSKSTSGGTAALGCLVKDYFPEPVTVSWNSGALTSGVHTFPAVLQSSGLYSLSSVVTVPSSSLGTQTYICNVNHKPSNTKVDKKVEPKSCDKTHTCPPCPAPELLGGPSVFLFPPKPKDTLMISRTPEVTCVVVDVSHEDPEVKFNWYVDGVEVHNAKTKPREEQYNSTYRVVSVLTVLHQDWLNGKEYKCKVSNKALPAPIEKTISKAKGQPREPQVYTLPPCREEMTKNQVSLWCLVKGFYPSDIAVEWESNGQPENNYKTTPPVLDSDGSFFLYSKLTVDKSRWQQGNVFSCSVMHEALHNHYTQKSLSLSPGGGGGSGGGGSQVQLVESGGGVVQPGRSLRLSCAASGFTISGYTMHWFRQAPGKGLEWVASIDTGGDTTYLPSVKGRFTISRDNSKNTLYLQMNSLRAEDTAVYYCATDRNGGGAFDVWGQGTLVTVSS

SEQ ID NO: 8726 - protein, 579 aa, synthetic construct
EVQLVESGGGLVQPGGSLRLSCSASGFTFSSFGMHWVRQAPGKGLEWVAYISSGSSTIYYGDTVKGRFTISRDNAKNSLFLQMSSLRAEDTAVYYCAREGGYYYGRSYYTMDYWGQGTTVTVSSASTKGPSVFPLAPSSKSTSGGTAALGCLVKDYFPEPVTVSWNSGALTSGVHTFPAVLQSSGLYSLSSVVTVPSSSLGTQTYICNVNHKPSNTKVDKKVEPKSCDKTHTCPPCPAPELLGGPSVFLFPPKPKDTLMISRTPEVTCVVVDVSHEDPEVKFNWYVDGVEVHNAKTKPREEQYNSTYRVVSVLTVLHQDWLNGKEYKCKVSNKALPAPIEKTISKAKGQPREPQVYTLPPCREEMTKNQVSLWCLVKGFYPSDIAVEWESNGQPENNYKTTPPVLDSDGSFFLYSKLTVDKSRWQQGNVFSCSVMHEALHNHYTQKSLSLSPGGGGGSGGGGSQVQLVESGGGVVQPGRSLRLSCAASGFISTYYMSWVRQAPGKGPEWVSTTGADGTTYYADSVNGRFTVSQDNAKNTVYLQMNSLRAEDTAVYYCARYEDGPGFDIWGQGTLVTVSS

SEQ ID NO: 8727 - protein, 583 aa, synthetic construct
EVQLVESGGGLVQPGGSLRLSCSASGFTFSSFGMHWVRQAPGKGLEWVAYISSGSSTIYYGDTVKGRFTISRDNAKNSLFLQMSSLRAEDTAVYYCAREGGYYYGRSYYTMDYWGQGTTVTVSSASTKGPSVFPLAPSSKSTSGGTAALGCLVKDYFPEPVTVSWNSGALTSGVHTFPAVLQSSGLYSLSSVVTVPSSSLGTQTYICNVNHKPSNTKVDKKVEPKSCDKTHTCPPCPAPELLGGPSVFLFPPKPKDTLMISRTPEVTCVVVDVSHEDPEVKFNWYVDGVEVHNAKTKPREEQYNSTYRVVSVLTVLHQDWLNGKEYKCKVSNKALPAPIEKTISKAKGQPREPQVYTLPPCREEMTKNQVSLWCLVKGFYPSDIAVEWESNGQPENNYKTTPPVLDSDGSFFLYSKLTVDKSRWQQGNVFSCSVMHEALHNHYTQKSLSLSPGGGGGSGGGGSQVQLVESGGGVVQPGRSLRLSCAASGYTLPMSMGWYRQAPGKDREGVAAIAGDGRTDYADSVKGRFTISRDNSKNTLYLQMNSLRAEDTAVYYCARGADWNYGYWYFDLWGQGTLVTVSS

SEQ ID NO: 8728 - protein, 588 aa, synthetic construct
EVQLVESGGGLVQPGGSLRLSCSASGFTFSSFGMHWVRQAPGKGLEWVAYISSGSSTIYYGDTVKGRFTISRDNAKNSLFLQMSSLRAEDTAVYYCAREGGYYYGRSYYTMDYWGQGTTVTVSSASTKGPSVFPLAPSSKSTSGGTAALGCLVKDYFPEPVTVSWNSGALTSGVHTFPAVLQSSGLYSLSSVVTVPSSSLGTQTYICNVNHKPSNTKVDKKVEPKSCDKTHTCPPCPAPELLGGPSVFLFPPKPKDTLMISRTPEVTCVVVDVSHEDPEVKFNWYVDGVEVHNAKTKPREEQYNSTYRVVSVLTVLHQDWLNGKEYKCKVSNKALPAPIEKTISKAKGQPREPQVYTLPPCREEMTKNQVSLWCLVKGFYPSDIAVEWESNGQPENNYKTTPPVLDSDGSFFLYSKLTVDKSRWQQGNVFSCSVMHEALHNHYTQKSLSLSPGGGGGSGGGGSQVQLVESGGGVVQPGRSLRLSCAASGFPFGGYSVGWFRQAPGKEREGVAVIDRDGSTTYADSVKGRFTISRDNANDTLYLQMNSLRAEDTAVYYCAKSAKYYYEGSYYYVHFDYWGQGTLVTVSS

SEQ ID NO: 8729 - protein, 586 aa, synthetic construct
EVQLVESGGGLVQPGGSLRLSCSASGFTFSSFGMHWVRQAPGKGLEWVAYISSGSSTIYYGDTVKGRFTISRDNAKNSLFLQMSSLRAEDTAVYYCAREGGYYYGRSYYTMDYWGQGTTVTVSSASTKGPSVFPLAPSSKSTSGGTAALGCLVKDYFPEPVTVSWNSGALTSGVHTFPAVLQSSGLYSLSSVVTVPSSSLGTQTYICNVNHKPSNTKVDKKVEPKSCDKTHTCPPCPAPELLGGPSVFLFPPKPKDTLMISRTPEVTCVVVDVSHEDPEVKFNWYVDGVEVHNAKTKPREEQYNSTYRVVSVLTVLHQDWLNGKEYKCKVSNKALPAPIEKTISKAKGQPREPQVYTLPPCREEMTKNQVSLWCLVKGFYPSDIAVEWESNGQPENNYKTTPPVLDSDGSFFLYSKLTVDKSRWQQGNVFSCSVMHEALHNHYTQKSLSLSPGGGGGSGGGGSQVQLVESGGGVVQPGRSLRLSCAASGFTTTTYTMGWFRQAPGKGRELVAVIDSDGDTAYAESVEGRFTISRDNAKRMVYLQMNSLRAEDTAVYYCARDKGGYGDYPFFLFDYWGQGTLVTVSS

SEQ ID NO: 8730 - protein, 581 aa, synthetic construct
EVQLVESGGGLVQPGGSLRLSCSASGFTFSSFGMHWVRQAPGKGLEWVAYISSGSSTIYYGDTVKGRFTISRDNAKNSLFLQMSSLRAEDTAVYYCAREGGYYYGRSYYTMDYWGQGTTVTVSSASTKGPSVFPLAPSSKSTSGGTAALGCLVKDYFPEPVTVSWNSGALTSGVHTFPAVLQSSGLYSLSSVVTVPSSSLGTQTYICNVNHKPSNTKVDKKVEPKSCDKTHTCPPCPAPELLGGPSVFLFPPKPKDTLMISRTPEVTCVVVDVSHEDPEVKFNWYVDGVEVHNAKTKPREEQYNSTYRVVSVLTVLHQDWLNGKEYKCKVSNKALPAPIEKTISKAKGQPREPQVYTLPPCREEMTKNQVSLWCLVKGFYPSDIAVEWESNGQPENNYKTTPPVLDSDGSFFLYSKLTVDKSRWQQGNVFSCSVMHEALHNHYTQKSLSLSPGGGGGSGGGGSQVQLVESGGGVVQPGRSLRLSCAASGFTFSSYAMSWFRQAPGKGRELVAAIDSDGSTSYADSVEGRFTISRDNAKRMVYLQMNSLRAEDTAVYYCARVDFYYYYMDVWGQGTLVTVSS

SEQ ID NO: 8731 - protein, 579 aa, synthetic construct
EVQLVESGGGLVQPGGSLRLSCSASGFTFSSFGMHWVRQAPGKGLEWVAYISSGSSTIYYGDTVKGRFTISRDNAKNSLFLQMSSLRAEDTAVYYCAREGGYYYGRSYYTMDYWGQGTTVTVSSASTKGPSVFPLAPSSKSTSGGTAALGCLVKDYFPEPVTVSWNSGALTSGVHTFPAVLQSSGLYSLSSVVTVPSSSLGTQTYICNVNHKPSNTKVDKKVEPKSCDKTHTCPPCPAPELLGGPSVFLFPPKPKDTLMISRTPEVTCVVVDVSHEDPEVKFNWYVDGVEVHNAKTKPREEQYNSTYRVVSVLTVLHQDWLNGKEYKCKVSNKALPAPIEKTISKAKGQPREPQVYTLPPCREEMTKNQVSLWCLVKGFYPSDIAVEWESNGQPENNYKTTPPVLDSDGSFFLYSKLTVDKSRWQQGNVFSCSVMHEALHNHYTQKSLSLSPGGGGGSGGGGSQVQLVESGGGVVQPGRSLRLSCAASGATSNTYYMGWFRQAPGKEREGVATIRRDDLTAYTDSVKGRFTISRDNTKNTLYLQMNSLRAEDTAVYYCARLDSNGYSYWGQGTLVTVSS

SEQ ID NO: 8732 - protein, 582 aa, synthetic construct
EVQLVESGGGLVQPGGSLRLSCSASGFTFSSFGMHWVRQAPGKGLEWVAYISSGSSTIYYGDTVKGRFTISRDNAKNSLFLQMSSLRAEDTAVYYCAREGGYYYGRSYYTMDYWGQGTTVTVSSASTKGPSVFPLAPSSKSTSGGTAALGCLVKDYFPEPVTVSWNSGALTSGVHTFPAVLQSSGLYSLSSVVTVPSSSLGTQTYICNVNHKPSNTKVDKKVEPKSCDKTHTCPPCPAPELLGGPSVFLFPPKPKDTLMISRTPEVTCVVVDVSHEDPEVKFNWYVDGVEVHNAKTKPREEQYNSTYRVVSVLTVLHQDWLNGKEYKCKVSNKALPAPIEKTISKAKGQPREPQVYTLPPCREEMTKNQVSLWCLVKGFYPSDIAVEWESNGQPENNYKTTPPVLDSDGSFFLYSKLTVDKSRWQQGNVFSCSVMHEALHNHYTQKSLSLSPGGGGGSGGGGSQVQLVESGGGVVQPGRSLRLSCAASGRSNENYFLAWYRQAPGKDREGVAVIYSDGKTVYADSVKGRFTISRDNSKNTLYLQMNSLRAEDTAVYYCTEYGFKNGYAFDAWGQGTLVTVSS

SEQ ID NO: 8733 - protein, 580 aa, synthetic construct
EVQLVESGGGLVQPGGSLRLSCSASGFTFSSFGMHWVRQAPGKGLEWVAYISSGSSTIYYGDTVKGRFTISRDNAKNSLFLQMSSLRAEDTAVYYCAREGGYYYGRSYYTMDYWGQGTTVTVSSASTKGPSVFPLAPSSKSTSGGTAALGCLVKDYFPEPVTVSWNSGALTSGVHTFPAVLQSSGLYSLSSVVTVPSSSLGTQTYICNVNHKPSNTKVDKKVEPKSCDKTHTCPPCPAPELLGGPSVFLFPPKPKDTLMISRTPEVTCVVVDVSHEDPEVKFNWYVDGVEVHNAKTKPREEQYNSTYRVVSVLTVLHQDWLNGKEYKCKVSNKALPAPIEKTISKAKGQPREPQVYTLPPCREEMTKNQVSLWCLVKGFYPSDIAVEWESNGQPENNYKTTPPVLDSDGSFFLYSKLTVDKSRWQQGNVFSCSVMHEALHNHYTQKSLSLSPGGGGGSGGGGSQVQLVESGGGVVQPGRSLRLSCAASGATSNTYYMGWFRLAPGKEREGVASIYTQDGRTAYADSVKGRFTISEDNAKNTVYLQMNSLRAEDTAVYYCARIDIDGYAYWGQGTLVTVSS

SEQ ID NO: 8734 - protein, 581 aa, synthetic construct
EVQLVESGGGLVQPGGSLRLSCSASGFTFSSFGMHWVRQAPGKGLEWVAYISSGSSTIYYGDTVKGRFTISRDNAKNSLFLQMSSLRAEDTAVYYCAREGGYYYGRSYYTMDYWGQGTTVTVSSASTKGPSVFPLAPSSKSTSGGTAALGCLVKDYFPEPVTVSWNSGALTSGVHTFPAVLQSSGLYSLSSVVTVPSSSLGTQTYICNVNHKPSNTKVDKKVEPKSCDKTHTCPPCPAPELLGGPSVFLFPPKPKDTLMISRTPEVTCVVVDVSHEDPEVKFNWYVDGVEVHNAKTKPREEQYNSTYRVVSVLTVLHQDWLNGKEYKCKVSNKALPAPIEKTISKAKGQPREPQVYTLPPCREEMTKNQVSLWCLVKGFYPSDIAVEWESNGQPENNYKTTPPVLDSDGSFFLYSKLTVDKSRWQQGNVFSCSVMHEALHNHYTQKSLSLSPGGGGGSGGGGSQVQLVESGGGVVQPGRSLRLSCAASGSSDEIYAMAWFRQAPGKGRELVAAIENDGTTTYAHSVKGRFTISADTSKNTAYLQMNSLRAEDTAVYYCARDSTSWWYFDLWGQGTLVTVSS

SEQ ID NO: 8735 - protein, 580 aa, synthetic construct
EVQLVESGGGLVQPGGSLRLSCSASGFTFSSFGMHWVRQAPGKGLEWVAYISSGSSTIYYGDTVKGRFTISRDNAKNSLFLQMSSLRAEDTAVYYCAREGGYYYGRSYYTMDYWGQGTTVTVSSASTKGPSVFPLAPSSKSTSGGTAALGCLVKDYFPEPVTVSWNSGALTSGVHTFPAVLQSSGLYSLSSVVTVPSSSLGTQTYICNVNHKPSNTKVDKKVEPKSCDKTHTCPPCPAPELLGGPSVFLFPPKPKDTLMISRTPEVTCVVVDVSHEDPEVKFNWYVDGVEVHNAKTKPREEQYNSTYRVVSVLTVLHQDWLNGKEYKCKVSNKALPAPIEKTISKAKGQPREPQVYTLPPCREEMTKNQVSLWCLVKGFYPSDIAVEWESNGQPENNYKTTPPVLDSDGSFFLYSKLTVDKSRWQQGNVFSCSVMHEALHNHYTQKSLSLSPGGGGGSGGGGSQVQLVESGGGVVQPGRSLRLSCAASGPSASAKAMAWFRQSVGKEREGIAAIRHDGGETWYAASVKGRFTISRDNAKNTLYLQMNSLRAEDTAVYYCVRDHGGARDIWGQGTLVTVSS

SEQ ID NO: 8736 - protein, 581 aa, synthetic construct
EVQLVESGGGLVQPGGSLRLSCSASGFTFSSFGMHWVRQAPGKGLEWVAYISSGSSTIYYGDTVKGRFTISRDNAKNSLFLQMSSLRAEDTAVYYCAREGGYYYGRSYYTMDYWGQGTTVTVSSASTKGPSVFPLAPSSKSTSGGTAALGCLVKDYFPEPVTVSWNSGALTSGVHTFPAVLQSSGLYSLSSVVTVPSSSLGTQTYICNVNHKPSNTKVDKKVEPKSCDKTHTCPPCPAPELLGGPSVFLFPPKPKDTLMISRTPEVTCVVVDVSHEDPEVKFNWYVDGVEVHNAKTKPREEQYNSTYRVVSVLTVLHQDWLNGKEYKCKVSNKALPAPIEKTISKAKGQPREPQVYTLPPCREEMTKNQVSLWCLVKGFYPSDIAVEWESNGQPENNYKTTPPVLDSDGSFFLYSKLTVDKSRWQQGNVFSCSVMHEALHNHYTQKSLSLSPGGGGGSGGGGSQVQLVESGGGVVQPGRSLRLSCAASGLSVSDSSMAWFRQRPGQEREGIAAIDTGDGSTYYLNSVEGRFTISHDNAKNTLYLQMNSLRAEDTAVYYCVRQQRDGLVNFWGQGTLVTVSS

SEQ ID NO: 8737 - protein, 582 aa, synthetic construct
EVQLVESGGGLVQPGGSLRLSCSASGFTFSSFGMHWVRQAPGKGLEWVAYISSGSSTIYYGDTVKGRFTISRDNAKNSLFLQMSSLRAEDTAVYYCAREGGYYYGRSYYTMDYWGQGTTVTVSSASTKGPSVFPLAPSSKSTSGGTAALGCLVKDYFPEPVTVSWNSGALTSGVHTFPAVLQSSGLYSLSSVVTVPSSSLGTQTYICNVNHKPSNTKVDKKVEPKSCDKTHTCPPCPAPELLGGPSVFLFPPKPKDTLMISRTPEVTCVVVDVSHEDPEVKFNWYVDGVEVHNAKTKPREEQYNSTYRVVSVLTVLHQDWLNGKEYKCKVSNKALPAPIEKTISKAKGQPREPQVYTLPPCREEMTKNQVSLWCLVKGFYPSDIAVEWESNGQPENNYKTTPPVLDSDGSFFLYSKLTVDKSRWQQGNVFSCSVMHEALHNHYTQKSLSLSPGGGGGSGGGGSQVQLVESGGGVVQPGRSLRLSCAASGFTVGARAMAWYRQAPGKDREGVAAIDSDGIASYADSVKGRFTISRDNAKNTLYLQMNSLRAEDTAVYYCARVSGSYGDYFDYWGQGTLVTVSS

SEQ ID NO: 8738 - protein, 579 aa, synthetic construct
EVQLVESGGGLVQPGGSLRLSCSASGFTFSSFGMHWVRQAPGKGLEWVAYISSGSSTIYYGDTVKGRFTISRDNAKNSLFLQMSSLRAEDTAVYYCAREGGYYYGRSYYTMDYWGQGTTVTVSSASTKGPSVFPLAPSSKSTSGGTAALGCLVKDYFPEPVTVSWNSGALTSGVHTFPAVLQSSGLYSLSSVVTVPSSSLGTQTYICNVNHKPSNTKVDKKVEPKSCDKTHTCPPCPAPELLGGPSVFLFPPKPKDTLMISRTPEVTCVVVDVSHEDPEVKFNWYVDGVEVHNAKTKPREEQYNSTYRVVSVLTVLHQDWLNGKEYKCKVSNKALPAPIEKTISKAKGQPREPQVYTLPPCREEMTKNQVSLWCLVKGFYPSDIAVEWESNGQPENNYKTTPPVLDSDGSFFLYSKLTVDKSRWQQGNVFSCSVMHEALHNHYTQKSLSLSPGGGGGSGGGGSQVQLVESGGGVVQPGRSLRLSCAASGYTFDESDMGWFRQAPGKGRELVSTISPDGTTYYADSVEGRFTISRDNAKRMVYLQMNSLRAEDTAVYYCARWRRSWFDTWGQGTLVTVSS

SEQ ID NO: 8739 - protein, 581 aa, synthetic construct
EVQLVESGGGLVQPGGSLRLSCSASGFTFSSFGMHWVRQAPGKGLEWVAYISSGSSTIYYGDTVKGRFTISRDNAKNSLFLQMSSLRAEDTAVYYCAREGGYYYGRSYYTMDYWGQGTTVTVSSASTKGPSVFPLAPSSKSTSGGTAALGCLVKDYFPEPVTVSWNSGALTSGVHTFPAVLQSSGLYSLSSVVTVPSSSLGTQTYICNVNHKPSNTKVDKKVEPKSCDKTHTCPPCPAPELLGGPSVFLFPPKPKDTLMISRTPEVTCVVVDVSHEDPEVKFNWYVDGVEVHNAKTKPREEQYNSTYRVVSVLTVLHQDWLNGKEYKCKVSNKALPAPIEKTISKAKGQPREPQVYTLPPCREEMTKNQVSLWCLVKGFYPSDIAVEWESNGQPENNYKTTPPVLDSDGSFFLYSKLTVDKSRWQQGNVFSCSVMHEALHNHYTQKSLSLSPGGGGGSGGGGSQVQLVESGGGVVQPGRSLRLSCAASGYTVATYFIGWFRQAPGKAREGVATITSDGRTKYADSVKGRFTISRDNAKNTVYLQMNSLRAEDTAVYYCASRSIAAAGEGYWGQGTLVTVSS

SEQ ID NO: 8740 - protein, 579 aa, synthetic construct
EVQLVESGGGLVQPGGSLRLSCSASGFTFSSFGMHWVRQAPGKGLEWVAYISSGSSTIYYGDTVKGRFTISRDNAKNSLFLQMSSLRAEDTAVYYCAREGGYYYGRSYYTMDYWGQGTTVTVSSASTKGPSVFPLAPSSKSTSGGTAALGCLVKDYFPEPVTVSWNSGALTSGVHTFPAVLQSSGLYSLSSVVTVPSSSLGTQTYICNVNHKPSNTKVDKKVEPKSCDKTHTCPPCPAPELLGGPSVFLFPPKPKDTLMISRTPEVTCVVVDVSHEDPEVKFNWYVDGVEVHNAKTKPREEQYNSTYRVVSVLTVLHQDWLNGKEYKCKVSNKALPAPIEKTISKAKGQPREPQVYTLPPCREEMTKNQVSLWCLVKGFYPSDIAVEWESNGQPENNYKTTPPVLDSDGSFFLYSKLTVDKSRWQQGNVFSCSVMHEALHNHYTQKSLSLSPGGGGGSGGGGSQVQLVESGGGVVQPGRSLRLSCAASGYPSCMGWARQAPGKGLEWVACIERRGRIHYAASVKGRFTISRDNSKNTLYLQMNSLRAEDTAVYYCASQDSSSYDAFDIWGQGTLVTVSS

SEQ ID NO: 8741 - protein, 580 aa, synthetic construct
EVQLVESGGGLVQPGGSLRLSCSASGFTFSSFGMHWVRQAPGKGLEWVAYISSGSSTIYYGDTVKGRFTISRDNAKNSLFLQMSSLRAEDTAVYYCAREGGYYYGRSYYTMDYWGQGTTVTVSSASTKGPSVFPLAPSSKSTSGGTAALGCLVKDYFPEPVTVSWNSGALTSGVHTFPAVLQSSGLYSLSSVVTVPSSSLGTQTYICNVNHKPSNTKVDKKVEPKSCDKTHTCPPCPAPELLGGPSVFLFPPKPKDTLMISRTPEVTCVVVDVSHEDPEVKFNWYVDGVEVHNAKTKPREEQYNSTYRVVSVLTVLHQDWLNGKEYKCKVSNKALPAPIEKTISKAKGQPREPQVYTLPPCREEMTKNQVSLWCLVKGFYPSDIAVEWESNGQPENNYKTTPPVLDSDGSFFLYSKLTVDKSRWQQGNVFSCSVMHEALHNHYTQKSLSLSPGGGGGSGGGGSQVQLVESGGGVVQPGRSLRLSCAASGGAYRKYYMGWFRQAPGKGRELVAAIESDGTTDYADSVEGRFTISRDNAKRMVYLQMNSLRAEDTAVYYCASVIGGNSEDYWGQGTLVTVSS

SEQ ID NO: 8742 - protein, 588 aa, synthetic construct
EVQLVESGGGLVQPGGSLRLSCSASGFTFSSFGMHWVRQAPGKGLEWVAYISSGSSTIYYGDTVKGRFTISRDNAKNSLFLQMSSLRAEDTAVYYCAREGGYYYGRSYYTMDYWGQGTTVTVSSASTKGPSVFPLAPSSKSTSGGTAALGCLVKDYFPEPVTVSWNSGALTSGVHTFPAVLQSSGLYSLSSVVTVPSSSLGTQTYICNVNHKPSNTKVDKKVEPKSCDKTHTCPPCPAPELLGGPSVFLFPPKPKDTLMISRTPEVTCVVVDVSHEDPEVKFNWYVDGVEVHNAKTKPREEQYNSTYRVVSVLTVLHQDWLNGKEYKCKVSNKALPAPIEKTISKAKGQPREPQVYTLPPCREEMTKNQVSLWCLVKGFYPSDIAVEWESNGQPENNYKTTPPVLDSDGSFFLYSKLTVDKSRWQQGNVFSCSVMHEALHNHYTQKSLSLSPGGGGGSGGGGSQVQLVESGGGVVQPGRSLRLSCAASGDANEFEWIGWYRQAPGKGRELVARIGSSGPRYADSVEGRFTISRDNSKNTLYLQMNSLRAEDTAVYYCAATHCSFLTTSVAGCTDDKYWGQGTLVTVSS

SEQ ID NO: 8743 - protein, 582 aa, synthetic construct
EVQLVESGGGLVQPGGSLRLSCSASGFTFSSFGMHWVRQAPGKGLEWVAYISSGSSTIYYGDTVKGRFTISRDNAKNSLFLQMSSLRAEDTAVYYCAREGGYYYGRSYYTMDYWGQGTTVTVSSASTKGPSVFPLAPSSKSTSGGTAALGCLVKDYFPEPVTVSWNSGALTSGVHTFPAVLQSSGLYSLSSVVTVPSSSLGTQTYICNVNHKPSNTKVDKKVEPKSCDKTHTCPPCPAPELLGGPSVFLFPPKPKDTLMISRTPEVTCVVVDVSHEDPEVKFNWYVDGVEVHNAKTKPREEQYNSTYRVVSVLTVLHQDWLNGKEYKCKVSNKALPAPIEKTISKAKGQPREPQVYTLPPCREEMTKNQVSLWCLVKGFYPSDIAVEWESNGQPENNYKTTPPVLDSDGSFFLYSKLTVDKSRWQQGNVFSCSVMHEALHNHYTQKSLSLSPGGGGGSGGGGSQVQLVESGGGVVQPGRSLRLSCAASGFTLGTNCMAWFRQAPGKERERVASIGSDGRTYYADSVKGRFTISRDNSKNTLYLQMNSLRAEDTAVYYCARAPGIQLWKFDYWGQGTLVTVSS

SEQ ID NO: 8744 - protein, 582 aa, synthetic construct
EVQLVESGGGLVQPGGSLRLSCSASGFTFSSFGMHWVRQAPGKGLEWVAYISSGSSTIYYGDTVKGRFTISRDNAKNSLFLQMSSLRAEDTAVYYCAREGGYYYGRSYYTMDYWGQGTTVTVSSASTKGPSVFPLAPSSKSTSGGTAALGCLVKDYFPEPVTVSWNSGALTSGVHTFPAVLQSSGLYSLSSVVTVPSSSLGTQTYICNVNHKPSNTKVDKKVEPKSCDKTHTCPPCPAPELLGGPSVFLFPPKPKDTLMISRTPEVTCVVVDVSHEDPEVKFNWYVDGVEVHNAKTKPREEQYNSTYRVVSVLTVLHQDWLNGKEYKCKVSNKALPAPIEKTISKAKGQPREPQVYTLPPCREEMTKNQVSLWCLVKGFYPSDIAVEWESNGQPENNYKTTPPVLDSDGSFFLYSKLTVDKSRWQQGNVFSCSVMHEALHNHYTQKSLSLSPGGGGGSGGGGSQVQLVESGGGVVQPGRSLRLSCAASGFTNSKTYLGWVRRAPGKGLEWVAAIAPSTGSTYYDDSVKGRFTISRDNSKNTLYLQMNSLRAEDTAVYYCASQGSSWYENDYWGQGTLVTVSS

SEQ ID NO: 8745 - protein, 582 aa, synthetic construct
EVQLVESGGGLVQPGGSLRLSCSASGFTFSSFGMHWVRQAPGKGLEWVAYISSGSSTIYYGDTVKGRFTISRDNAKNSLFLQMSSLRAEDTAVYYCAREGGYYYGRSYYTMDYWGQGTTVTVSSASTKGPSVFPLAPSSKSTSGGTAALGCLVKDYFPEPVTVSWNSGALTSGVHTFPAVLQSSGLYSLSSVVTVPSSSLGTQTYICNVNHKPSNTKVDKKVEPKSCDKTHTCPPCPAPELLGGPSVFLFPPKPKDTLMISRTPEVTCVVVDVSHEDPEVKFNWYVDGVEVHNAKTKPREEQYNSTYRVVSVLTVLHQDWLNGKEYKCKVSNKALPAPIEKTISKAKGQPREPQVYTLPPCREEMTKNQVSLWCLVKGFYPSDIAVEWESNGQPENNYKTTPPVLDSDGSFFLYSKLTVDKSRWQQGNVFSCSVMHEALHNHYTQKSLSLSPGGGGGSGGGGSQVQLVESGGGVVQPGRSLRLSCAASGFRFDDYAMGWFRQAPGKEREGVAGYKSDGSTTYADSVKGRFTISRDNSKNTLYLQMNSLRAEDTAVYYCASRALYGGKPFVIWGQGTLVTVSS

SEQ ID NO: 8746 - protein, 590 aa, synthetic construct
EVQLVESGGGLVQPGGSLRLSCSASGFTFSSFGMHWVRQAPGKGLEWVAYISSGSSTIYYGDTVKGRFTISRDNAKNSLFLQMSSLRAEDTAVYYCAREGGYYYGRSYYTMDYWGQGTTVTVSSASTKGPSVFPLAPSSKSTSGGTAALGCLVKDYFPEPVTVSWNSGALTSGVHTFPAVLQSSGLYSLSSVVTVPSSSLGTQTYICNVNHKPSNTKVDKKVEPKSCDKTHTCPPCPAPELLGGPSVFLFPPKPKDTLMISRTPEVTCVVVDVSHEDPEVKFNWYVDGVEVHNAKTKPREEQYNSTYRVVSVLTVLHQDWLNGKEYKCKVSNKALPAPIEKTISKAKGQPREPQVYTLPPCREEMTKNQVSLWCLVKGFYPSDIAVEWESNGQPENNYKTTPPVLDSDGSFFLYSKLTVDKSRWQQGNVFSCSVMHEALHNHYTQKSLSLSPGGGGGSGGGGSQVQLVESGGGVVQPGRSLRLSCAASGSPDRRACMGWYRQAPGKERERVAEIDTDGNTSYADSVKGRFTISRDNSKNTVYLQMNSLRAEDTAVYYCALQPGCPPATLFYWRKTGFGNWGQGTLVTVSS

SEQ ID NO: 8747 - protein, 585 aa, synthetic construct
EVQLVESGGGLVQPGGSLRLSCSASGFTFSSFGMHWVRQAPGKGLEWVAYISSGSSTIYYGDTVKGRFTISRDNAKNSLFLQMSSLRAEDTAVYYCAREGGYYYGRSYYTMDYWGQGTTVTVSSASTKGPSVFPLAPSSKSTSGGTAALGCLVKDYFPEPVTVSWNSGALTSGVHTFPAVLQSSGLYSLSSVVTVPSSSLGTQTYICNVNHKPSNTKVDKKVEPKSCDKTHTCPPCPAPELLGGPSVFLFPPKPKDTLMISRTPEVTCVVVDVSHEDPEVKFNWYVDGVEVHNAKTKPREEQYNSTYRVVSVLTVLHQDWLNGKEYKCKVSNKALPAPIEKTISKAKGQPREPQVYTLPPCREEMTKNQVSLWCLVKGFYPSDIAVEWESNGQPENNYKTTPPVLDSDGSFFLYSKLTVDKSRWQQGNVFSCSVMHEALHNHYTQKSLSLSPGGGGGSGGGGSQVQLVESGGGVVQPGRSLRLSCAASGFTFDDTDMGWFRQAPGKERERVSTINSDGGTTYYADSVKGRFTISRDNSKNTLYLQMNSLRAEDTAVYYCARARVTDAGWQYFDYWGQGTLVTVSS

SEQ ID NO: 8748 - protein, 580 aa, synthetic construct
EVQLVESGGGLVQPGGSLRLSCSASGFTFSSFGMHWVRQAPGKGLEWVAYISSGSSTIYYGDTVKGRFTISRDNAKNSLFLQMSSLRAEDTAVYYCAREGGYYYGRSYYTMDYWGQGTTVTVSSASTKGPSVFPLAPSSKSTSGGTAALGCLVKDYFPEPVTVSWNSGALTSGVHTFPAVLQSSGLYSLSSVVTVPSSSLGTQTYICNVNHKPSNTKVDKKVEPKSCDKTHTCPPCPAPELLGGPSVFLFPPKPKDTLMISRTPEVTCVVVDVSHEDPEVKFNWYVDGVEVHNAKTKPREEQYNSTYRVVSVLTVLHQDWLNGKEYKCKVSNKALPAPIEKTISKAKGQPREPQVYTLPPCREEMTKNQVSLWCLVKGFYPSDIAVEWESNGQPENNYKTTPPVLDSDGSFFLYSKLTVDKSRWQQGNVFSCSVMHEALHNHYTQKSLSLSPGGGGGSGGGGSQVQLVESGGGVVQPGRSLRLSCAASGFTFSDYYIGWFRQAPGKERERVAQIDKNGVTNYADAVKGRFTISRDNSKNTLYLQMNSLRAEDTAVYYCAGVDAFNYMEVWGQGTLVTVSS

SEQ ID NO: 8749 - protein, 584 aa, synthetic construct
EVQLVESGGGLVQPGGSLRLSCSASGFTFSSFGMHWVRQAPGKGLEWVAYISSGSSTIYYGDTVKGRFTISRDNAKNSLFLQMSSLRAEDTAVYYCAREGGYYYGRSYYTMDYWGQGTTVTVSSASTKGPSVFPLAPSSKSTSGGTAALGCLVKDYFPEPVTVSWNSGALTSGVHTFPAVLQSSGLYSLSSVVTVPSSSLGTQTYICNVNHKPSNTKVDKKVEPKSCDKTHTCPPCPAPELLGGPSVFLFPPKPKDTLMISRTPEVTCVVVDVSHEDPEVKFNWYVDGVEVHNAKTKPREEQYNSTYRVVSVLTVLHQDWLNGKEYKCKVSNKALPAPIEKTISKAKGQPREPQVYTLPPCREEMTKNQVSLWCLVKGFYPSDIAVEWESNGQPENNYKTTPPVLDSDGSFFLYSKLTVDKSRWQQGNVFSCSVMHEALHNHYTQKSLSLSPGGGGGSGGGGSQVQLVESGGGVVQPGRSLRLSCAASGDFNDARAEWGWFRQAPGKGRELVASLASDGSTIYANPVEGRFTISRDNAKNTLYLQMNSLRAEDTAVYYCARSGASSSWYWFDYWGQGTLVTVSS

SEQ ID NO: 8750 - protein, 581 aa, synthetic construct
EVQLVESGGGLVQPGGSLRLSCSASGFTFSSFGMHWVRQAPGKGLEWVAYISSGSSTIYYGDTVKGRFTISRDNAKNSLFLQMSSLRAEDTAVYYCAREGGYYYGRSYYTMDYWGQGTTVTVSSASTKGPSVFPLAPSSKSTSGGTAALGCLVKDYFPEPVTVSWNSGALTSGVHTFPAVLQSSGLYSLSSVVTVPSSSLGTQTYICNVNHKPSNTKVDKKVEPKSCDKTHTCPPCPAPELLGGPSVFLFPPKPKDTLMISRTPEVTCVVVDVSHEDPEVKFNWYVDGVEVHNAKTKPREEQYNSTYRVVSVLTVLHQDWLNGKEYKCKVSNKALPAPIEKTISKAKGQPREPQVYTLPPCREEMTKNQVSLWCLVKGFYPSDIAVEWESNGQPENNYKTTPPVLDSDGSFFLYSKLTVDKSRWQQGNVFSCSVMHEALHNHYTQKSLSLSPGGGGGSGGGGSQVQLVESGGGVVQPGRSLRLSCAASGSIHNRRHMGWFRQAAGKEREGVAAIDIAGNTRISDSVKGRFTISHDKDENRLYLQMNSLRAEDTAVYYCAIQSSDGRGTVYWGQGTLVTVSS

SEQ ID NO: 8751 - protein, 582 aa, synthetic construct
EVQLVESGGGLVQPGGSLRLSCSASGFTFSSFGMHWVRQAPGKGLEWVAYISSGSSTIYYGDTVKGRFTISRDNAKNSLFLQMSSLRAEDTAVYYCAREGGYYYGRSYYTMDYWGQGTTVTVSSASTKGPSVFPLAPSSKSTSGGTAALGCLVKDYFPEPVTVSWNSGALTSGVHTFPAVLQSSGLYSLSSVVTVPSSSLGTQTYICNVNHKPSNTKVDKKVEPKSCDKTHTCPPCPAPELLGGPSVFLFPPKPKDTLMISRTPEVTCVVVDVSHEDPEVKFNWYVDGVEVHNAKTKPREEQYNSTYRVVSVLTVLHQDWLNGKEYKCKVSNKALPAPIEKTISKAKGQPREPQVYTLPPCREEMTKNQVSLWCLVKGFYPSDIAVEWESNGQPENNYKTTPPVLDSDGSFFLYSKLTVDKSRWQQGNVFSCSVMHEALHNHYTQKSLSLSPGGGGGSGGGGSQVQLVESGGGVVQPGRSLRLSCAASGRRGNNYSMAWYRQAPGKDREGVAAIDSDGDTSYADPVKGRFTISRDNSKNTLYLQMNSLRAEDTAVYYCAVATGEYRRYFDVWGQGTLVTVSS

SEQ ID NO: 8752 - protein, 581 aa, synthetic construct
EVQLVESGGGLVQPGGSLRLSCSASGFTFSSFGMHWVRQAPGKGLEWVAYISSGSSTIYYGDTVKGRFTISRDNAKNSLFLQMSSLRAEDTAVYYCAREGGYYYGRSYYTMDYWGQGTTVTVSSASTKGPSVFPLAPSSKSTSGGTAALGCLVKDYFPEPVTVSWNSGALTSGVHTFPAVLQSSGLYSLSSVVTVPSSSLGTQTYICNVNHKPSNTKVDKKVEPKSCDKTHTCPPCPAPELLGGPSVFLFPPKPKDTLMISRTPEVTCVVVDVSHEDPEVKFNWYVDGVEVHNAKTKPREEQYNSTYRVVSVLTVLHQDWLNGKEYKCKVSNKALPAPIEKTISKAKGQPREPQVYTLPPCREEMTKNQVSLWCLVKGFYPSDIAVEWESNGQPENNYKTTPPVLDSDGSFFLYSKLTVDKSRWQQGNVFSCSVMHEALHNHYTQKSLSLSPGGGGGSGGGGSQVQLVESGGGVVQPGRSLRLSCAASGFAFTKYHMSWFRQAPGKGRELVSHISAGGRTYYSDSVEGRFTISRDNAKRMVYLQMNSLRAEDTAVYYCVKESRPHSYGDHWGQGTLVTVSS

SEQ ID NO: 8753 - DNA, 351 bp, synthetic construct
  source 1..351: mol_type = other DNA
caggtgcaactggtcgagtccggcggaggcgtcgtgcaacctggcaggagcctcagactctcctgtgctgctagcggcttttcttttagcaatttcggaatgagctgggtacgacaggcacgcggaaaaggattggagtgggtttcctcaactggatctgacggcactgcgtactatgctgactccgtgaaaggaaggttcactatttctagggataacgcgaagaatacactttatttgcagatgaactctctgcgagctgaggacaccgcggtgtactactgcgccagagccccaagtagacacgggttcgactactggggccaaggaaccctggttacagtcagcagc

SEQ ID NO: 8754 - DNA, 351 bp, synthetic construct
  source 1..351: mol_type = other DNA
caggtgcaactggtcgagtccggcggaggcgtcgtgcaacctggcaggagcctcagactctcctgtgctgctagcggcttcagcttcagcaatttcggcatgagctgggtgcgtcaggcccgagggaaaggcttggaatgggtcagttccatcgggagcgacggacgagcttactacgctgacagcgtgaagggtcggtttactatcagcagagataacgccaagaacactctgtacctgcaaatgaattctctgagggcagaggatactgccgtgtactattgtgccagggcgccttcaaggcacggatttgactactggggccaaggaaccctggttacagtcagcagc

SEQ ID NO: 8755 - DNA, 351 bp, synthetic construct
  source 1..351: mol_type = other DNA
caggtgcaactggtcgagtccggcggaggcgtcgtgcaacctggcaggagcctcagactctcctgtgctgctagcggcttcagcttcagcaatttcggcatgagctgggtgcgtcaggcccgagggaaaggcttggaatgggtcagttccgtagggagcgacggaaccgcttactacgctgacagcgtgaagggtcggtttactatcagcagagataacgccaagaacactctgtacctgcaaatgaattctctgagggcagaggatactgccgtgtactattgtgccagggcgccttcaaggcacggatttgactactggggccaaggaaccctggttacagtcagcagc

SEQ ID NO: 8756 - DNA, 351 bp, synthetic construct
  source 1..351: mol_type = other DNA
caggtgcaactggtcgagtccggcggaggcgtcgtgcaacctggcaggagcctcagactctcctgtgctgctagcggcttcagcttcagcaatttcggcatgagctgggtgcgtcaggcccccgggaaaggcttggaatgggtcagttccaccgggagcgacggaaccgcttactacgctgacagcgtgaagggtcggtttactatcagcagagataacgccaagaacactctgcacctgcaaatgaattctctgagggcagaggatactgccgtgtactattgtgccagggcgccttcaaggcacggatttgactactggggccaaggaaccctggttacagtcagcagc

SEQ ID NO: 8757 - DNA, 348 bp, synthetic construct
  source 1..348: mol_type = other DNA
caggtgcaactggtcgagtccggcggaggcgtcgtgcaacctggcaggagcctcagactctcctgtgctgctagcggcttcgctgtcgatgctagcgatatgggctggttccgccaagccccaggcaaaggacgagaactggtctcatctatctccagcgataacgacacctattacgcagacagcgtggagggacgcttcaccattagtcgtgacaatgctaagcggatggtctacctgcagatgaattcactgagggctgaagatacagctgtgtactactgcgctagcggtagatttctggagcctgattactggggccaaggaaccctggttacagtcagcagc

SEQ ID NO: 8758 - DNA, 351 bp, synthetic construct
  source 1..351: mol_type = other DNA
caggtgcaactggtcgagtccggcggaggcgtcgtgcaacctggcaggagcctcagactctcctgtgctgctagcggcttcacctttgacgactcagacatgggttggtttaggcaggctcctggtaaaggccgggagctggtcgctgctatcaacacaggaggaggaaagacctactatgctgcaacagtcgaaggacggtttacaatatccagggataacgccaagcgcatggtgtatttgcagatgaactcccttagagctgaggacaccgcagtatactattgcgcctcagggcgatttttagaacccgactactggggccaaggaaccctggttacagtcagcagc

SEQ ID NO: 8759 - DNA, 354 bp, synthetic construct
  source 1..354: mol_type = other DNA
caggtgcaactggtcgagtccggcggaggcgtcgtgcaacctggcaggagcctcagactctcctgtgctgctagcggcctgacattcgatgatagcgatatggggtggtttcgccaggctcctggtaaagagcgtgaaagagtatccactatatctagtgacggtaccccacactatgatgactcagtcaaaggccgctttaccattagcagagacaatagcaaaaatactctgtaccttcagatgaattcacttcgagcggaagacactgccgtgtactactgtgcaagacgcgatggtggcagctggaatttcgactattggggccaaggaaccctggttacagtcagcagc

SEQ ID NO: 8760 - DNA, 351 bp, synthetic construct
  source 1..351: mol_type = other DNA
caggtgcaactggtcgagtccggcggaggcgtcgtgcaacctggcaggagcctcagactctcctgtgctgctagcggctttaccttcgatggatccgacattgcatgggtcaggagagccccaggaaaaggagaggagtgggtgagtaccatcagttcagacggcactgtgtactacagtgaccctgtgaagggaagatttacaatctctgctgatacatcaaagaacactgcatatctgcaaatgaacagtcttagggcagaagacaccgcagtgtactactgtgccatcagctcttggtacggcgacttcgactactggggccaaggaaccctggttacagtcagcagc

SEQ ID NO: 8761 - DNA, 363 bp, synthetic construct
  source 1..363: mol_type = other DNA
caggtgcaactggtcgagtccggcggaggcgtcgtgcaacctggcaggagcctcagactctcctgtgctgctagcggccatattctgaattattggtatatgggttgggtaagacgtgctcccggaaaaggagaagagtgggtcgctggcatatccccgggggggaccgtcacggtctatgccgactcagtgaagggaaggttcactataagcagagataattccaagaacactctgtacctccagatgaactcactgagggcagaggatacggctgtgtactactgtgctagaggcggccagggtggtgacgcttgggccttcgactattggggccaaggaaccctggttacagtcagcagc

SEQ ID NO: 8762 - DNA, 360 bp, synthetic construct
  source 1..360: mol_type = other DNA
caggtgcaactggtcgagtccggcggaggcgtcgtgcaacctggcaggagcctcagactctcctgtgctgctagcggcttcggcgtggcctcaagcgacatgggttggttcaggcaggcccctggaaagggaagggagctggtggccagtattaatactgacgggtcaacgatctacgcggagtctgtggagggcaggttcaccatctcaagagacaacgccaagaggatggtctacctccagatgaactctttgcgggccgaagatactgctgtgtattactgcgccgcatacgataccagcgcataccactctcctttcgactactggggccaaggaaccctggttacagtcagcagc

SEQ ID NO: 8763 - DNA, 357 bp, synthetic construct
  source 1..357: mol_type = other DNA
caggtgcaactggtcgagtccggcggaggcgtcgtgcaacctggcaggagcctcagactctcctgtgctgctagcggctacaccttccgctcagccagtatggggtgggttcggagggcccctggcaagggtgaggagtgggtggccgtgatagacagtgagggacatactatctacgctgactctgtaaaagggcggtttactataagcgccgatacctcaaaaaatactgcatatctccagatgaactccctcagagccgaggatactgccgtgtattattgtgcgaaggatatttatggtgactatggcggtcccgactattggggccaaggaaccctggttacagtcagcagc

SEQ ID NO: 8764 - DNA, 357 bp, synthetic construct
  source 1..357: mol_type = other DNA
caggtgcaactggtcgagtccggcggaggcgtcgtgcaacctggcaggagcctcagactctcctgtgctgctagcggcacccgacgtcctaactacgttacatggttcagacaagctccactgaacgagcgacaagtcgtcgccggcattgacagcgccggcaccactacgtacgccgattctgtcaagggcaggttcactatcagccaggataacgcgaaaaacactgtatatctgcagatgaacagtctgcgtgcggaggatacagccgtttactactgtgcttcaggaatttcttcctcatccttctatccattcgactcttggggccaaggaaccctggttacagtcagcagc

SEQ ID NO: 8765 - DNA, 354 bp, synthetic construct
  source 1..354: mol_type = other DNA
caggtgcaactggtcgagtccggcggaggcgtcgtgcaacctggcaggagcctcagactctcctgtgctgctagcggctttaactttgacgacagtgacatggggtggtttcgccaagcgccagggaaaggtagagagttggtctcctcaatcgcatctgacggggcgacatattacgcggactccgtggagggccggtttaccatctcccgggataatgcaaagaggatggtgtacctgcaaatgaattccctccgagctgaagatacagctgtctactactgtgctcgagatagtccgtcattgcgagcctttgactcctggggccaaggaaccctggttacagtcagcagc

SEQ ID NO: 8766 - DNA, 357 bp, synthetic construct
  source 1..357: mol_type = other DNA
caggtgcaactggtcgagtccggcggaggcgtcgtgcaacctggcaggagcctcagactctcctgtgctgctagcggcaccacctattctcgccaatactgtatgggatgggcgaggcaggccccaggtaagggcctggaatgggtcagctgtattgacgacgatgggaatacctattacgccgatagcgttaagggtagatttactatcagcagagataatagtaagaacacactctatctccagatgaattctctgcgcgccgaagatactgcagtgtactactgtgctagagaccctggcctcagcggagactttgattattggggccaaggaaccctggttacagtcagcagc

SEQ ID NO: 8767 - DNA, 360 bp, synthetic construct
  source 1..360: mol_type = other DNA
caggtgcaactggtcgagtccggcggaggcgtcgtgcaacctggcaggagcctcagactctcctgtgctgctagcggcattacctaccgggggccatgcatggggtggtatcgccaggcgcccgggaaagggcttgagtgggttgcgactctcgactctgacgggagcaccacttatgcggattctgtgaaaggacggtttacgatctctagggataacagcaaaaatacactgtatctgcagatgaatagcctccgcgcagaggatactgcggtgtattactgcgcaatgtatatgacaggcggagggggtgtagcatttgattactggggccaaggaaccctggttacagtcagcagc

SEQ ID NO: 8768 - DNA, 357 bp, synthetic construct
  source 1..357: mol_type = other DNA
caggtgcaactggtcgagtccggcggaggcgtcgtgcaacctggcaggagcctcagactctcctgtgctgctagcggctttaccttctccaaatacgctatgaactgggccagacaagcgccgggcaagggcctcgagtgggtagcgtttatcgatacggccggcaggaccatctatgccgattcagtgaaaggcagatttaccatttcccgggataactcaaagaataccttgtaccttcaaatgaattctctgagagctgaagataccgccgtctattattgcgcccctagctacggcgattccggagattacttcgactattggggccaaggaaccctggttacagtcagcagc

SEQ ID NO: 8769 - DNA, 363 bp, synthetic construct
  source 1..363: mol_type = other DNA
caggtgcaactggtcgagtccggcggaggcgtcgtgcaacctggcaggagcctcagactctcctgtgctgctagcggcttccctttttctagctacggaatgggatggttccgtcaggctccaggcaaggagcgagagggtgttgcaggagtgaatacggggggaagaacatcctatgcagagtccgtaaaggggcgattcaccatctcccgggacaatacacgcaacacactttacttacagatgaatagccttcgtgccgaagataccgccgtgtattactgtgctagaatacgggcggccggcacagtggcgccctacttcgactactggggccaaggaaccctggttacagtcagcagc

SEQ ID NO: 8770 - DNA, 354 bp, synthetic construct
  source 1..354: mol_type = other DNA
caggtgcaactggtcgagtccggcggaggcgtcgtgcaacctggcaggagcctcagactctcctgtgctgctagcggctacgtcgctggttacgtgggatggtacaggcaggctccaggtaaggatagggagggcgtagctgctatcgccagtgatgggatgacagcctacgcccatagtgtaaaaggcaggttcaccatctccagagataatagcaaaaacactctgtaccttcagatgaattctctcagggctgaagatactgctgtgtattactgtgcgtccggttactgctcagggtcaggctgctacttcgacagttggggccaaggaaccctggttacagtcagcagc

SEQ ID NO: 8771 - DNA, 348 bp, synthetic construct
  source 1..348: mol_type = other DNA
caggtgcaactggtcgagtccggcggaggcgtcgtgcaacctggcaggagcctcagactctcctgtgctgctagcggcttccgatataatagctacgccatggcctgggcacgtcaggctccaggcaagggacttgagtgggttgcagccatcgccggggacggaagaacagattatgcagactccgtaaaggggcgattcaccatctcccgggacaatagtaaaaacacactttacttacagatgaatagccttcgtgccgaagataccgccgtgtattactgtgctagagaggatacggccgccttcgactactggggccaaggaaccctggttacagtcagcagc

SEQ ID NO: 8772 - DNA, 378 bp, synthetic construct
  source 1..378: mol_type = other DNA
caggtgcaactggtcgagtccggcggaggcgtcgtgcaacctggcaggagcctcagactctcctgtgctgctagcggctaccgatctaatgggtactacatgggatggttccgtcaggctagtggcaaggagcgagagggtgttgcagtgatcgatagcgggggaagtacatcctatgcagactccgtaaaggggcgattcaccatctccctcgacaatgccaaaaacacactttacttacagatgaatagccttcgtgccgaagataccgccgtgtattactgtgctagaggggtaaagcggtatggagacgggggcacagacctctactattacttcgactattggggccaaggaaccctggttacagtcagcagc

SEQ ID NO: 8773 - DNA, 354 bp, synthetic construct
  source 1..354: mol_type = other DNA
caggtgcaactggtcgagtccggcggaggcgtcgtgcaacctggcaggagcctcagactctcctgtgctgctagcggctacaccttacctatgagcaccgcatgggcgaggcaagcacctggaaaagggctagaatgggttgctgcaatcgcctccgacgggagaacagactatgctgactcagtcaaggggaggtttaccatttcgcgagataactccaagaatacagtgtatctgcaaatgaattcactgcgcgctgaagatactgccgtctactattgcgccactctgtggtggtacggcggcagaacgttcgacagttggggccaaggaaccctggttacagtcagcagc

SEQ ID NO: 8774 - DNA, 375 bp, synthetic construct
  source 1..375: mol_type = other DNA
caggtgcaactggtcgagtccggcggaggcgtcgtgcaacctggcaggagcctcagactctcctgtgctgctagcggcttcacctttgatgacttcgacatgggatggtaccgtcaggctccaggcaaggaccgagagggtgttgcagtgatccggagcgacggaatcctggcctatagtgactccgtaaaggggcgattcaccatctcccgggacaatagtaaaaacacagtctacttacagatgaatagccttcgtgccgaagataccgccgtgtattactgtgctagaagccggagcaactatagtagcgacgcctacgcctactactggttcgacgtgtggggccaaggaaccctggttacagtcagcagc

SEQ ID NO: 8775 - DNA, 357 bp, synthetic construct
  source 1..357: mol_type = other DNA
caggtgcaactggtcgagtccggcggaggcgtcgtgcaacctggcaggagcctcagactctcctgtgctgctagcggcggatttgatgatgcagacgccgagtgggggtgggctaggcaagcacctgggaagggcctcgaatgggtggccgccatcgcgggggacggaagaaccgattacgccggctcagtgaagggccggtttaccatttccagggataactctaagaacactgtgtatcttcaaatgaactccttacgggctgaagacaccgcagtctactattgtgccaagaatgggcagtcaggattcagcttcgacccctggggccaaggaaccctggttacagtcagcagc

SEQ ID NO: 8776 - DNA, 366 bp, synthetic construct
  source 1..366: mol_type = other DNA
caggtgcaactggtcgagtccggcggaggcgtcgtgcaacctggcaggagcctcagactctcctgtgctgctagcggctacaccttacctatgagcaccgcatgggcgaggcaagcacctggaaaagggctagaatgggttgctgcaatcgcctccgacgggagaacagactatgctgactcagtcaaggggaggtttaccatttcgcgagataactccaagaatacagtgtatctgcaaatgaattcactgcgcgctgaagatactgccgtctactattgcgcctctctgagccgggggacctatagtagcgggtggaagtgggacgactattggggccaaggaaccctggttacagtcagcagc

SEQ ID NO: 8777 - DNA, 363 bp, synthetic construct
  source 1..363: mol_type = other DNA
caggtgcaactggtcgagtccggcggaggcgtcgtgcaacctggcaggagcctcagactctcctgtgctgctagcggcttcaccttttctagctacgccatgtcatggttccgtcaggctctgggcaaggaccgagagggtgttgcagccatcgatagcgacggaacaacatcctatggagagtccgtaaaggggcgattcaccatctcccgggacaatagtaaaaacacagtctacttacagatgaatagccttcgtgccgaagataccgccgtgtattactgtgctagagcgtggggggtaggcgacgactactacagaatggactactggggccaaggaaccctggttacagtcagcagc

SEQ ID NO: 8778 - DNA, 357 bp, synthetic construct
  source 1..357: mol_type = other DNA
caggtgcaactggtcgagtccggcggaggcgtcgtgcaacctggcaggagcctcagactctcctgtgctgctagcggctacaccgctactaactacgccatgggatgggtgcgtagggctccaggcaagggagaagagtgggttgcaacaatcgatagcgacggaagagcatcctatgcagactccgtaaaggggcgattcaccatctccgccgacactagtaaaaacacagcttacttacagatgaatagccttcgtgccgaagataccgccgtgtattactgtggtagactgcagtactcatcaggatggtactcagactactggggccaaggaaccctggttacagtcagcagc

SEQ ID NO: 8779 - DNA, 354 bp, synthetic construct
  source 1..354: mol_type = other DNA
caggtgcaactggtcgagtccggcggaggcgtcgtgcaacctggcaggagcctcagactctcctgtgctgctagcggcttctcctttgatgacctggacatgggatgggcacgtcaggctccaggcaagggacttgagtgggttgcaacaatcaccaacggggactacacacggtatagtgactccgtaaaggggcgattcaccatctcccgggacaatagtaaaaacacactttacttacagatgaatagccttcgtgccgaagataccgccgtgtattactgtgctagagacctcagcggctcactgtacttcgactactggggccaaggaaccctggttacagtcagcagc

SEQ ID NO: 8780 - DNA, 363 bp, synthetic construct
  source 1..363: mol_type = other DNA
caggtgcaactggtcgagtccggcggaggcgtcgtgcaacctggcaggagcctcagactctcctgtgctgctagcggctacaccgtttctaacaactgcatgggatggttccgtcaggctccaggcaaggagcgagagttagttgcagtgatcggcagcgacggacacgcaacctatgcagcctccgtagaggggcgattcaccatctcccgggacaatgccaaaaggatggtctacttacagatgaatagccttcgtgccgaagataccgccgtgtattactgtgctagagcgcacccgcggggcagtgggagctactacttcgactactggggccaaggaaccctggttacagtcagcagc

SEQ ID NO: 8781 - DNA, 360 bp, synthetic construct
  source 1..360: mol_type = other DNA
caggtgcaactggtcgagtccggcggaggcgtcgtgcaacctggcaggagcctcagactctcctgtgctgctagcggcttccgatataatagctacgccatggcctgggcacgtcaggctccaggcaagggagaagagtgggttgcagccatcgatggggacggaacaacagattatgcagactccgtaaaggggcgattcaccatctccgccgacactagtaaaaacacagtctacttacagatgaatagccttcgtgccgaagataccgccgtgtattactgtgctacagtgaagaagttctggaacgggtacgccttcgactcatggggccaaggaaccctggttacagtcagcagc

SEQ ID NO: 8782 - DNA, 363 bp, synthetic construct
  source 1..363: mol_type = other DNA
caggtgcaactggtcgagtccggcggaggcgtcgtgcaacctggcaggagcctcagactctcctgtgctgctagcggcttcccttttggtgggtactcggtgggatggttccgtcaggctccaggcaaggagcgagagggtgttgcagtgatcgatagggacggaagtacaacctatgcagactccgtaaaggggcgattcaccatctcccgggacaatgccaaagacacactttacttacagatgaatagccttcgtgccgaagataccgccgtgtattactgtgctagagggggcaggaagggcctggggtggtactacttcgactactggggccaaggaaccctggttacagtcagcagc

SEQ ID NO: 8783 - DNA, 351 bp, synthetic construct
  source 1..351: mol_type = other DNA
caggtgcaactggtcgagtccggcggaggcgtcgtgcaacctggcaggagcctcagactctcctgtgctgctagcggcttctccttttctagctaccccatgacctgggtgcgtcaggctccaggcaagggacccgagtgggttagtatgatcaatagggacggaagtacatattatggagactccgtaaaggggcgattcgccatctcccgggacaatgccaaaaacacactttacttacagatgaatagccttcgtgccgaagataccgccgtgtattactgtgctagagacggcgggtcatatgacatggacgtatggggccaaggaaccctggttacagtcagcagc

SEQ ID NO: 8784 - DNA, 348 bp, synthetic construct
  source 1..348: mol_type = other DNA
caggtgcaactggtcgagtccggcggaggcgtcgtgcaacctggcaggagcctcagactctcctgtgctgctagcggctacaccttacctatgagcaccgcatgggcgaggcaagcacctggaaaagggctagaatgggttgctgcaatcgcctccgacgggagaacagactatgctgactcagtcaaggggaggtttaccatttcgcgagataactccaagaatacagtgtatctgcaaatgaattcactgcgcgctgaagatactgccgtctactattgcgccactctgagcatggcgcggaatagtgactactggggccaaggaaccctggttacagtcagcagc

SEQ ID NO: 8785 - DNA, 354 bp, synthetic construct
  source 1..354: mol_type = other DNA
caggtgcaactggtcgagtccggcggaggcgtcgtgcaacctggcaggagcctcagactctcctgtgctgctagcggcttcaccatttctgggtacaccatgcactggttccgtcaggctccaggcaagggacttgagtgggttgcaagtatcgatacggggggagacacaacctatctgccctccgtaaaggggcgattcaccatctcccgggacaatagtaaaaacacactttacttacagatgaatagccttcgtgccgaagataccgccgtgtattactgtgctacagaccggaacggcggcggagcgttcgacgtgtggggccaaggaaccctggttacagtcagcagc

SEQ ID NO: 8786 - DNA, 348 bp, synthetic construct
  source 1..348: mol_type = other DNA
caggtgcaactggtcgagtccggcggaggcgtcgtgcaacctggcaggagcctcagactctcctgtgctgctagcggcttcatttctacttactacatgagttgggtgaggcaagcacctggaaaagggcccgaatgggtttctacaacaggagccgacgggacaacatactatgctgactcagtcaacgggaggtttaccgtctcgcaggataacgctaagaatacagtgtatctgcaaatgaattcactgcgcgctgaagatactgccgtctactattgcgcccgctacgaggatgggcccggcttcgacatatggggccaaggaaccctggttacagtcagcagc

SEQ ID NO: 8787 - DNA, 360 bp, synthetic construct
  source 1..360: mol_type = other DNA
caggtgcaactggtcgagtccggcggaggcgtcgtgcaacctggcaggagcctcagactctcctgtgctgctagcggctacaccttacctatgagcatgggatggtacaggcaagcacctggaaaagaccgggaaggcgttgctgcaatcgccggcgacgggagaacagactatgctgactcagtcaaggggaggtttaccatttcgcgagataactccaagaatacactgtatctgcaaatgaattcactgcgcgctgaagatactgccgtctactattgcgcccgcggagcggattggaactatggatactggtacttcgacctctggggccaaggaaccctggttacagtcagcagc

SEQ ID NO: 8788 - DNA, 375 bp, synthetic construct
  source 1..375: mol_type = other DNA
caggtgcaactggtcgagtccggcggaggcgtcgtgcaacctggcaggagcctcagactctcctgtgctgctagcggcttcccttttggtgggtactcggtgggatggttccgtcaggctccaggcaaggagcgagagggtgttgcagtgatcgatagggacggaagtacaacctatgcagactccgtaaaggggcgattcaccatctcccgggacaatgccaatgacacactttacttacagatgaatagccttcgtgccgaagataccgccgtgtattactgtgctaagagcgccaagtactattacgaggggtcatactactacgtgcatttcgactactggggccaaggaaccctggttacagtcagcagc

SEQ ID NO: 8789 - DNA, 369 bp, synthetic construct
  source 1..369: mol_type = other DNA
caggtgcaactggtcgagtccggcggaggcgtcgtgcaacctggcaggagcctcagactctcctgtgctgctagcggcttcaccactactacatacaccatgggatggttccgtcaggctccaggcaagggacgagagttagttgcagtgatcgatagcgacggagacacagcctatgcagagtccgtagaggggcgattcaccatctcccgggacaatgccaaaaggatggtctacttacagatgaatagccttcgtgccgaagataccgccgtgtattactgtgctagagacaaggggggctatggagactaccccttcttcctcttcgattactggggccaaggaaccctggttacagtcagcagc

SEQ ID NO: 8790 - DNA, 354 bp, synthetic construct
  source 1..354: mol_type = other DNA
caggtgcaactggtcgagtccggcggaggcgtcgtgcaacctggcaggagcctcagactctcctgtgctgctagcggcttcaccttttctagctacgccatgtcatggttccgtcaggctccaggcaagggacgagagttagttgcagccatcgatagcgacggaagtacatcctatgcagactccgtagaggggcgattcaccatctcccgggacaatgccaaaaggatggtctacttacagatgaatagccttcgtgccgaagataccgccgtgtattactgtgctagagtggatttctactattactacatggacgtgtggggccaaggaaccctggttacagtcagcagc

SEQ ID NO: 8791 - DNA, 348 bp, synthetic construct
  source 1..348: mol_type = other DNA
caggtgcaactggtcgagtccggcggaggcgtcgtgcaacctggcaggagcctcagactctcctgtgctgctagcggcgccacctctaatacatactacatgggatggttccgtcaggctccaggcaaggagcgagagggtgttgcaacaatccggagggacgacctgacagcctatacagactccgtaaaggggcgattcaccatctcccgggacaatacaaaaaacacactttacttacagatgaatagccttcgtgccgaagataccgccgtgtattactgtgctagactggatagcaacggctacagctactggggccaaggaaccctggttacagtcagcagc

SEQ ID NO: 8792 - DNA, 357 bp, synthetic construct
  source 1..357: mol_type = other DNA
caggtgcaactggtcgagtccggcggaggcgtcgtgcaacctggcaggagcctcagactctcctgtgctgctagcggcagatccaatgaaaactacttcctggcctggtaccgtcaggctccaggcaaggaccgagagggtgttgcagtgatctatagcgacggaaagacagtctatgcagactccgtaaaggggcgattcaccatctcccgggacaatagtaaaaacacactttacttacagatgaatagccttcgtgccgaagataccgccgtgtattactgtactgagtacggcttcaagaatggatacgcgttcgacgcctggggccaaggaaccctggttacagtcagcagc

SEQ ID NO: 8793 - DNA, 351 bp, synthetic construct
  source 1..351: mol_type = other DNA
caggtgcaactggtcgagtccggcggaggcgtcgtgcaacctggcaggagcctcagactctcctgtgctgctagcggcgccacctctaatacatactacatgggatggttccgtctggctccaggcaaggagcgagagggtgttgcaagtatctatacgcaggacggaagaaccgcttacgccgattcagtgaagggccggtttaccatttccgaggataacgctaagaacactgtgtatcttcaaatgaactccttacgggctgaagacaccgcagtctactattgtgccaggatcgacatcgatggatacgcgtactggggccaaggaaccctggttacagtcagcagc

SEQ ID NO: 8794 - DNA, 354 bp, synthetic construct
  source 1..354: mol_type = other DNA
caggtgcaactggtcgagtccggcggaggcgtcgtgcaacctggcaggagcctcagactctcctgtgctgctagcggcagttccgatgaaatctacgccatggcctggttccgtcaggctccaggcaagggacgagagttagttgcagccatcgaaaacgacggaacaacaacctatgcacactccgtaaaggggcgattcaccatctccgccgacactagtaaaaacacagcttacttacagatgaatagccttcgtgccgaagataccgccgtgtattactgtgctagagactcaacgtcatggtggtacttcgacctgtggggccaaggaaccctggttacagtcagcagc

SEQ ID NO: 8795 - DNA, 351 bp, synthetic construct
  source 1..351: mol_type = other DNA
caggtgcaactggtcgagtccggcggaggcgtcgtgcaacctggcaggagcctcagactctcctgtgctgctagcggcccatccgcttctgcaaaggccatggcctggttccgtcagtctgtgggcaaggagcgagagggtattgcagccatccggcacgacggaggagagacctggtacgccgcctcagtgaagggccggtttaccatttccagggataacgctaagaacactctgtatcttcaaatgaactccttacgggctgaagacaccgcagtctactattgtgtgagggatcacggcggcgccagggacatctggggccaaggaaccctggttacagtcagcagc

SEQ ID NO: 8796 - DNA, 354 bp, synthetic construct
  source 1..354: mol_type = other DNA
caggtgcaactggtcgagtccggcggaggcgtcgtgcaacctggcaggagcctcagactctcctgtgctgctagcggcctgtccgtttctgacagctcgatggcctggttccgtcagcgtccaggccaggagcgagagggtattgcagccatcgatacgggggacggaagtacctattacctcaattcagtggagggccggtttaccatttcccacgataacgctaagaacactctgtatcttcaaatgaactccttacgggctgaagacaccgcagtctactattgtgtgaggcagcagcgggatggactggtgaatttctggggccaaggaaccctggttacagtcagcagc

SEQ ID NO: 8797 - DNA, 357 bp, synthetic construct
  source 1..357: mol_type = other DNA
caggtgcaactggtcgagtccggcggaggcgtcgtgcaacctggcaggagcctcagactctcctgtgctgctagcggcttcaccgttggtgcaagggccatggcctggtaccgtcaggctccaggcaaggaccgagagggtgttgcagccatcgatagcgacggaatcgcatcctatgcagactccgtaaaggggcgattcaccatctcccgggacaatgccaaaaacacactttacttacagatgaatagccttcgtgccgaagataccgccgtgtattactgtgctagagtgtcagggtcatatggagactacttcgactactggggccaaggaaccctggttacagtcagcagc

SEQ ID NO: 8798 - DNA, 348 bp, synthetic construct
  source 1..348: mol_type = other DNA
caggtgcaactggtcgagtccggcggaggcgtcgtgcaacctggcaggagcctcagactctcctgtgctgctagcggctacacctttgatgagagcgacatgggatggttccgtcaggctccaggcaagggacgagagttagttagtacaatctccccggacggaacaacatattatgcagactccgtagaggggcgattcaccatctcccgggacaatgccaaaaggatggtctacttacagatgaatagccttcgtgccgaagataccgccgtgtattactgtgctagatggcggaggtcatggttcgacacgtggggccaaggaaccctggttacagtcagcagc

SEQ ID NO: 8799 - DNA, 354 bp, synthetic construct
  source 1..354: mol_type = other DNA
caggtgcaactggtcgagtccggcggaggcgtcgtgcaacctggcaggagcctcagactctcctgtgctgctagcggctacaccgttgctacatacttcatcggatggttccgtcaggctccaggcaaggcccgagagggtgttgcaacaatcaccagcgacggaagaacaaaatatgcagactccgtaaaggggcgattcaccatctcccgggacaatgccaaaaacacagtctacttacagatgaatagccttcgtgccgaagataccgccgtgtattactgtgctagtaggtcaatagccgccgccggggagggctactggggccaaggaaccctggttacagtcagcagc

SEQ ID NO: 8800 - DNA, 348 bp, synthetic construct
  source 1..348: mol_type = other DNA
caggtgcaactggtcgagtccggcggaggcgtcgtgcaacctggcaggagcctcagactctcctgtgctgctagcggctacccttcttgtatggggtgggcacggcaggcacctgggaaaggattggagtgggtcgcctgtattgagagaagaggcaggatacactacgcagcctctgtgaagggccggttcacgatttcgcgagacaattccaagaatacattgtacctgcaaatgaattccttgcgggcagaagataccgctgtttactattgcgctagccaggatagtagctcatacgacgccttcgacatatggggccaaggaaccctggttacagtcagcagc

SEQ ID NO: 8801 - DNA, 351 bp, synthetic construct
  source 1..351: mol_type = other DNA
caggtgcaactggtcgagtccggcggaggcgtcgtgcaacctggcaggagcctcagactctcctgtgctgctagcggcggagcctatcgtaagtactacatgggatggttccgtcaggctccaggcaagggacgagagttagttgcagccatcgaaagcgacggaacaacagattatgcagactccgtagaggggcgattcaccatctcccgggacaatgccaaaaggatggtctacttacagatgaatagccttcgtgccgaagataccgccgtgtattactgtgctagtgtgatcgggggcaatagtgaggactactggggccaaggaaccctggttacagtcagcagc

SEQ ID NO: 8802 - DNA, 375 bp, synthetic construct
  source 1..375: mol_type = other DNA
caggtgcaactggtcgagtccggcggaggcgtcgtgcaacctggcaggagcctcagactctcctgtgctgctagcggcgacgccaatgaattcgagtggatcggatggtaccgtcaggctccaggcaagggacgagagttagttgcaagaatcggcagcagcggaccaagatatgctgactcagtcgaggggaggtttaccatttcgcgagataactccaagaatacactgtatctgcaaatgaattcactgcgcgctgaagatactgccgtctactattgcgccgctacacactgtagcttcctcacaacgagcgtagcaggctgcacagatgacaagtactggggccaaggaaccctggttacagtcagcagc

SEQ ID NO: 8803 - DNA, 357 bp, synthetic construct
  source 1..357: mol_type = other DNA
caggtgcaactggtcgagtccggcggaggcgtcgtgcaacctggcaggagcctcagactctcctgtgctgctagcggcttcaccttaggtacaaactgcatggcctggttccgtcaggctccaggcaaggagcgagagcgtgttgcaagtatcggcagcgacggaagaacatattatgcagactccgtaaaggggcgattcaccatctcccgggacaatagtaaaaacacactttacttacagatgaatagccttcgtgccgaagataccgccgtgtattactgtgctagagcgcccgggatccagctgtggaagttcgactactggggccaaggaaccctggttacagtcagcagc

SEQ ID NO: 8804 - DNA, 357 bp, synthetic construct
  source 1..357: mol_type = other DNA
caggtgcaactggtcgagtccggcggaggcgtcgtgcaacctggcaggagcctcagactctcctgtgctgctagcggcttcaccaattctaagacgtacctgggatgggtgcgtagggctccaggcaagggacttgagtgggttgcagccatcgccccgagcacaggaagtacctattacgacgattcagtgaagggccggtttaccatttccagggataactctaagaacactctgtatcttcaaatgaactccttacgggctgaagacaccgcagtctactattgtgccagccaggggtcatcatggtacgagaatgactactggggccaaggaaccctggttacagtcagcagc

SEQ ID NO: 8805 - DNA, 357 bp, synthetic construct
  source 1..357: mol_type = other DNA
caggtgcaactggtcgagtccggcggaggcgtcgtgcaacctggcaggagcctcagactctcctgtgctgctagcggcttccgatttgatgactacgccatgggatggttccgtcaggctccaggcaaggagcgagagggtgttgcaggatacaaaagcgacggaagtacaacctatgcagactccgtaaaggggcgattcaccatctcccgggacaatagtaaaaacacactttacttacagatgaatagccttcgtgccgaagataccgccgtgtattactgtgctagtagggccctgtacggcggaaagccgttcgtgatctggggccaaggaaccctggttacagtcagcagc

SEQ ID NO: 8806 - DNA, 381 bp, synthetic construct
  source 1..381: mol_type = other DNA
caggtgcaactggtcgagtccggcggaggcgtcgtgcaacctggcaggagcctcagactctcctgtgctgctagcggcagtcctgatcgtagggcgtgcatgggatggtaccgtcaggctccaggcaaggagcgagagcgtgttgcagagatcgatacggacggaaacacatcctatgcagactccgtaaaggggcgattcaccatctcccgggacaatagtaaaaacacagtctacttacagatgaatagccttcgtgccgaagataccgccgtgtattactgtgctctgcagcccgggtgccccccagcgacgctcttctactggagaaaaacaggattcggtaactggggccaaggaaccctggttacagtcagcagc

SEQ ID NO: 8807 - DNA, 366 bp, synthetic construct
  source 1..366: mol_type = other DNA
caggtgcaactggtcgagtccggcggaggcgtcgtgcaacctggcaggagcctcagactctcctgtgctgctagcggcttcacctttgatgacacggacatgggatggttccgtcaggctccaggcaaggagcgagagcgtgttagtacaatcaatagcgacggaggaacaacctattacgccgattcagtgaagggccggtttaccatttccagggataactctaagaacactctgtatcttcaaatgaactccttacgggctgaagacaccgcagtctactattgtgccagggccagggtaaccgacgcggggtggcagtacttcgactattggggccaaggaaccctggttacagtcagcagc

SEQ ID NO: 8808 - DNA, 351 bp, synthetic construct
  source 1..351: mol_type = other DNA
caggtgcaactggtcgagtccggcggaggcgtcgtgcaacctggcaggagcctcagactctcctgtgctgctagcggcttcaccttttctgactactacatcggatggttccgtcaggctccaggcaaggagcgagagcgtgttgcacagatcgataagaacggagtgacaaattatgcagacgccgtaaaggggcgattcaccatctcccgggacaatagtaaaaacacactttacttacagatgaatagccttcgtgccgaagataccgccgtgtattactgtgctggagtggatgcgttcaattacatggaggtatggggccaaggaaccctggttacagtcagcagc

SEQ ID NO: 8809 - DNA, 363 bp, synthetic construct
  source 1..363: mol_type = other DNA
caggtgcaactggtcgagtccggcggaggcgtcgtgcaacctggcaggagcctcagactctcctgtgctgctagcggcgactttaatgatgcaagggccgagtgggggtggtttaggcaagcacctgggaagggccgggaattggtggccagtctcgcgagcgacggaagtaccatttacgccaatcccgtggagggccggtttaccatttccagggataacgctaagaacactctgtatcttcaaatgaactccttacgggctgaagacaccgcagtctactattgtgccaggtcaggggcctcaagtagctggtactggttcgactactggggccaaggaaccctggttacagtcagcagc

SEQ ID NO: 8810 - DNA, 354 bp, synthetic construct
  source 1..354: mol_type = other DNA
caggtgcaactggtcgagtccggcggaggcgtcgtgcaacctggcaggagcctcagactctcctgtgctgctagcggcagtattcataataggaggcacatgggatggttccgtcaggctgcaggcaaggagcgagagggtgttgcagccatcgatatagcgggaaacacacggattagtgactccgtaaaggggcgattcaccatctcccatgacaaagacgaaaacagactttacttacagatgaatagccttcgtgccgaagataccgccgtgtattactgtgctatccagtcaagcgacggcagagggacggtatactggggccaaggaaccctggttacagtcagcagc

SEQ ID NO: 8811 - DNA, 357 bp, synthetic construct
  source 1..357: mol_type = other DNA
caggtgcaactggtcgagtccggcggaggcgtcgtgcaacctggcaggagcctcagactctcctgtgctgctagcggcagacgaggtaataactactcgatggcctggtaccgtcaggctccaggcaaggaccgagagggtgttgcagccatcgatagcgacggagacacatcctatgcagaccccgtaaaggggcgattcaccatctcccgggacaatagtaaaaacacactttacttacagatgaatagccttcgtgccgaagataccgccgtgtattactgtgctgtggcgaccggggagtatagaaggtacttcgacgtatggggccaaggaaccctggttacagtcagcagc

SEQ ID NO: 8812 - DNA, 354 bp, synthetic construct
  source 1..354: mol_type = other DNA
caggtgcaactggtcgagtccggcggaggcgtcgtgcaacctggcaggagcctcagactctcctgtgctgctagcggcttcgcctttactaagtaccacatgtcatggttccgtcaggctccaggcaagggacgagagttagttagtcacatctccgcggggggaagaacatattatagtgactccgtagaggggcgattcaccatctcccgggacaatgccaaaaggatggtctacttacagatgaatagccttcgtgccgaagataccgccgtgtattactgtgttaaggagtcaaggccccacagttacggggaccactggggccaaggaaccctggttacagtcagcagc

SEQ ID NO: 8813 - protein, 117 aa, synthetic construct
QVQLVESGGGVVQPGRSLRLSCAASGFSFSNFGMSWVRQARGKGLEWVSSTGSDGTAYYADSVKGRFTISRDNAKNTLYLQMNSLRAEDTAVYYCARAPSRHGFDYWGQGTLVTVSS

SEQ ID NO: 8814 - protein, 117 aa, synthetic construct
QVQLVESGGGVVQPGRSLRLSCAASGFSFSNFGMSWVRQARGKGLEWVSSIGSDGRAYYADSVKGRFTISRDNAKNTLYLQMNSLRAEDTAVYYCARAPSRHGFDYWGQGTLVTVSS

SEQ ID NO: 8815 - protein, 117 aa, synthetic construct
QVQLVESGGGVVQPGRSLRLSCAASGFSFSNFGMSWVRQARGKGLEWVSSVGSDGTAYYADSVKGRFTISRDNAKNTLYLQMNSLRAEDTAVYYCARAPSRHGFDYWGQGTLVTVSS

SEQ ID NO: 8816 - protein, 117 aa, synthetic construct
QVQLVESGGGVVQPGRSLRLSCAASGFSFSNFGMSWVRQAPGKGLEWVSSTGSDGTAYYADSVKGRFTISRDNAKNTLHLQMNSLRAEDTAVYYCARAPSRHGFDYWGQGTLVTVSS

SEQ ID NO: 8817 - protein, 116 aa, synthetic construct
QVQLVESGGGVVQPGRSLRLSCAASGFAVDASDMGWFRQAPGKGRELVSSISSDNDTYYADSVEGRFTISRDNAKRMVYLQMNSLRAEDTAVYYCASGRFLEPDYWGQGTLVTVSS

SEQ ID NO: 8818 - protein, 117 aa, synthetic construct
QVQLVESGGGVVQPGRSLRLSCAASGFTFDDSDMGWFRQAPGKGRELVAAINTGGGKTYYAATVEGRFTISRDNAKRMVYLQMNSLRAEDTAVYYCASGRFLEPDYWGQGTLVTVSS

SEQ ID NO: 8819 - protein, 118 aa, synthetic construct
QVQLVESGGGVVQPGRSLRLSCAASGLTFDDSDMGWFRQAPGKERERVSTISSDGTPHYDDSVKGRFTISRDNSKNTLYLQMNSLRAEDTAVYYCARRDGGSWNFDYWGQGTLVTVSS

SEQ ID NO: 8820 - protein, 117 aa, synthetic construct
QVQLVESGGGVVQPGRSLRLSCAASGFTFDGSDIAWVRRAPGKGEEWVSTISSDGTVYYSDPVKGRFTISADTSKNTAYLQMNSLRAEDTAVYYCAISSWYGDFDYWGQGTLVTVSS

SEQ ID NO: 8821 - protein, 121 aa, synthetic construct
QVQLVESGGGVVQPGRSLRLSCAASGHILNYWYMGWVRRAPGKGEEWVAGISPGGTVTVYADSVKGRFTISRDNSKNTLYLQMNSLRAEDTAVYYCARGGQGGDAWAFDYWGQGTLVTVSS

SEQ ID NO: 8822 - protein, 120 aa, synthetic construct
QVQLVESGGGVVQPGRSLRLSCAASGFGVASSDMGWFRQAPGKGRELVASINTDGSTIYAESVEGRFTISRDNAKRMVYLQMNSLRAEDTAVYYCAAYDTSAYHSPFDYWGQGTLVTVSS

SEQ ID NO: 8823 - protein, 119 aa, synthetic construct
QVQLVESGGGVVQPGRSLRLSCAASGYTFRSASMGWVRRAPGKGEEWVAVIDSEGHTIYADSVKGRFTISADTSKNTAYLQMNSLRAEDTAVYYCAKDIYGDYGGPDYWGQGTLVTVSS

SEQ ID NO: 8824 - protein, 119 aa, synthetic construct
QVQLVESGGGVVQPGRSLRLSCAASGTRRPNYVTWFRQAPLNERQVVAGIDSAGTTTYADSVKGRFTISQDNAKNTVYLQMNSLRAEDTAVYYCASGISSSSFYPFDSWGQGTLVTVSS

SEQ ID NO: 8825 - protein, 118 aa, synthetic construct
QVQLVESGGGVVQPGRSLRLSCAASGFNFDDSDMGWFRQAPGKGRELVSSIASDGATYYADSVEGRFTISRDNAKRMVYLQMNSLRAEDTAVYYCARDSPSLRAFDSWGQGTLVTVSS

SEQ ID NO: 8826 - protein, 119 aa, synthetic construct
QVQLVESGGGVVQPGRSLRLSCAASGTTYSRQYCMGWARQAPGKGLEWVSCIDDDGNTYYADSVKGRFTISRDNSKNTLYLQMNSLRAEDTAVYYCARDPGLSGDFDYWGQGTLVTVSS

SEQ ID NO: 8827 - protein, 120 aa, synthetic construct
QVQLVESGGGVVQPGRSLRLSCAASGITYRGPCMGWYRQAPGKGLEWVATLDSDGSTTYADSVKGRFTISRDNSKNTLYLQMNSLRAEDTAVYYCAMYMTGGGGVAFDYWGQGTLVTVSS

SEQ ID NO: 8828 - protein, 119 aa, synthetic construct
QVQLVESGGGVVQPGRSLRLSCAASGFTFSKYAMNWARQAPGKGLEWVAFIDTAGRTIYADSVKGRFTISRDNSKNTLYLQMNSLRAEDTAVYYCAPSYGDSGDYFDYWGQGTLVTVSS

SEQ ID NO: 8829 - protein, 121 aa, synthetic construct
QVQLVESGGGVVQPGRSLRLSCAASGFPFSSYGMGWFRQAPGKEREGVAGVNTGGRTSYAESVKGRFTISRDNTRNTLYLQMNSLRAEDTAVYYCARIRAAGTVAPYFDYWGQGTLVTVSS

SEQ ID NO: 8830 - protein, 118 aa, synthetic construct
QVQLVESGGGVVQPGRSLRLSCAASGYVAGYVGWYRQAPGKDREGVAAIASDGMTAYAHSVKGRFTISRDNSKNTLYLQMNSLRAEDTAVYYCASGYCSGSGCYFDSWGQGTLVTVSS

SEQ ID NO: 8831 - protein, 116 aa, synthetic construct
QVQLVESGGGVVQPGRSLRLSCAASGFRYNSYAMAWARQAPGKGLEWVAAIAGDGRTDYADSVKGRFTISRDNSKNTLYLQMNSLRAEDTAVYYCAREDTAAFDYWGQGTLVTVSS

SEQ ID NO: 8832 - protein, 126 aa, synthetic construct
QVQLVESGGGVVQPGRSLRLSCAASGYRSNGYYMGWFRQASGKEREGVAVIDSGGSTSYADSVKGRFTISLDNAKNTLYLQMNSLRAEDTAVYYCARGVKRYGDGGTDLYYYFDYWGQGTLVTVSS

SEQ ID NO: 8833 - protein, 118 aa, synthetic construct
QVQLVESGGGVVQPGRSLRLSCAASGYTLPMSTAWARQAPGKGLEWVAAIASDGRTDYADSVKGRFTISRDNSKNTVYLQMNSLRAEDTAVYYCATLWWYGGRTFDSWGQGTLVTVSS

SEQ ID NO: 8834 - protein, 125 aa, synthetic construct
QVQLVESGGGVVQPGRSLRLSCAASGFTFDDFDMGWYRQAPGKDREGVAVIRSDGILAYSDSVKGRFTISRDNSKNTVYLQMNSLRAEDTAVYYCARSRSNYSSDAYAYYWFDVWGQGTLVTVSS

SEQ ID NO: 8835 - protein, 119 aa, synthetic construct
QVQLVESGGGVVQPGRSLRLSCAASGGFDDADAEWGWARQAPGKGLEWVAAIAGDGRTDYAGSVKGRFTISRDNSKNTVYLQMNSLRAEDTAVYYCAKNGQSGFSFDPWGQGTLVTVSS

SEQ ID NO: 8836 - protein, 122 aa, synthetic construct
QVQLVESGGGVVQPGRSLRLSCAASGYTLPMSTAWARQAPGKGLEWVAAIASDGRTDYADSVKGRFTISRDNSKNTVYLQMNSLRAEDTAVYYCASLSRGTYSSGWKWDDYWGQGTLVTVSS

SEQ ID NO: 8837 - protein, 121 aa, synthetic construct
QVQLVESGGGVVQPGRSLRLSCAASGFTFSSYAMSWFRQALGKDREGVAAIDSDGTTSYGESVKGRFTISRDNSKNTVYLQMNSLRAEDTAVYYCARAWGVGDDYYRMDYWGQGTLVTVSS

SEQ ID NO: 8838 - protein, 119 aa, synthetic construct
QVQLVESGGGVVQPGRSLRLSCAASGYTATNYAMGWVRRAPGKGEEWVATIDSDGRASYADSVKGRFTISADTSKNTAYLQMNSLRAEDTAVYYCGRLQYSSGWYSDYWGQGTLVTVSS

SEQ ID NO: 8839 - protein, 118 aa, synthetic construct
QVQLVESGGGVVQPGRSLRLSCAASGFSFDDLDMGWARQAPGKGLEWVATITNGDYTRYSDSVKGRFTISRDNSKNTLYLQMNSLRAEDTAVYYCARDLSGSLYFDYWGQGTLVTVSS

SEQ ID NO: 8840 - protein, 121 aa, synthetic construct
QVQLVESGGGVVQPGRSLRLSCAASGYTVSNNCMGWFRQAPGKERELVAVIGSDGHATYAASVEGRFTISRDNAKRMVYLQMNSLRAEDTAVYYCARAHPRGSGSYYFDYWGQGTLVTVSS

SEQ ID NO: 8841 - protein, 120 aa, synthetic construct
QVQLVESGGGVVQPGRSLRLSCAASGFRYNSYAMAWARQAPGKGEEWVAAIDGDGTTDYADSVKGRFTISADTSKNTVYLQMNSLRAEDTAVYYCATVKKFWNGYAFDSWGQGTLVTVSS

SEQ ID NO: 8842 - protein, 121 aa, synthetic construct
QVQLVESGGGVVQPGRSLRLSCAASGFPFGGYSVGWFRQAPGKEREGVAVIDRDGSTTYADSVKGRFTISRDNAKDTLYLQMNSLRAEDTAVYYCARGGRKGLGWYYFDYWGQGTLVTVSS

SEQ ID NO: 8843 - protein, 117 aa, synthetic construct
QVQLVESGGGVVQPGRSLRLSCAASGFSFSSYPMTWVRQAPGKGPEWVSMINRDGSTYYGDSVKGRFAISRDNAKNTLYLQMNSLRAEDTAVYYCARDGGSYDMDVWGQGTLVTVSS

SEQ ID NO: 8844 - protein, 116 aa, synthetic construct
QVQLVESGGGVVQPGRSLRLSCAASGYTLPMSTAWARQAPGKGLEWVAAIASDGRTDYADSVKGRFTISRDNSKNTVYLQMNSLRAEDTAVYYCATLSMARNSDYWGQGTLVTVSS

SEQ ID NO: 8845 - protein, 118 aa, synthetic construct
QVQLVESGGGVVQPGRSLRLSCAASGFTISGYTMHWFRQAPGKGLEWVASIDTGGDTTYLPSVKGRFTISRDNSKNTLYLQMNSLRAEDTAVYYCATDRNGGGAFDVWGQGTLVTVSS

SEQ ID NO: 8846 - protein, 116 aa, synthetic construct
QVQLVESGGGVVQPGRSLRLSCAASGFISTYYMSWVRQAPGKGPEWVSTTGADGTTYYADSVNGRFTVSQDNAKNTVYLQMNSLRAEDTAVYYCARYEDGPGFDIWGQGTLVTVSS

SEQ ID NO: 8847 - protein, 120 aa, synthetic construct
QVQLVESGGGVVQPGRSLRLSCAASGYTLPMSMGWYRQAPGKDREGVAAIAGDGRTDYADSVKGRFTISRDNSKNTLYLQMNSLRAEDTAVYYCARGADWNYGYWYFDLWGQGTLVTVSS

SEQ ID NO: 8848 - protein, 125 aa, synthetic construct
QVQLVESGGGVVQPGRSLRLSCAASGFPFGGYSVGWFRQAPGKEREGVAVIDRDGSTTYADSVKGRFTISRDNANDTLYLQMNSLRAEDTAVYYCAKSAKYYYEGSYYYVHFDYWGQGTLVTVSS

SEQ ID NO: 8849 - protein, 123 aa, synthetic construct
QVQLVESGGGVVQPGRSLRLSCAASGFTTTTYTMGWFRQAPGKGRELVAVIDSDGDTAYAESVEGRFTISRDNAKRMVYLQMNSLRAEDTAVYYCARDKGGYGDYPFFLFDYWGQGTLVTVSS

SEQ ID NO: 8850 - protein, 118 aa, synthetic construct
QVQLVESGGGVVQPGRSLRLSCAASGFTFSSYAMSWFRQAPGKGRELVAAIDSDGSTSYADSVEGRFTISRDNAKRMVYLQMNSLRAEDTAVYYCARVDFYYYYMDVWGQGTLVTVSS

SEQ ID NO: 8851 - protein, 116 aa, synthetic construct
QVQLVESGGGVVQPGRSLRLSCAASGATSNTYYMGWFRQAPGKEREGVATIRRDDLTAYTDSVKGRFTISRDNTKNTLYLQMNSLRAEDTAVYYCARLDSNGYSYWGQGTLVTVSS

SEQ ID NO: 8852 - protein, 119 aa, synthetic construct
QVQLVESGGGVVQPGRSLRLSCAASGRSNENYFLAWYRQAPGKDREGVAVIYSDGKTVYADSVKGRFTISRDNSKNTLYLQMNSLRAEDTAVYYCTEYGFKNGYAFDAWGQGTLVTVSS

SEQ ID NO: 8853 - protein, 117 aa, synthetic construct
QVQLVESGGGVVQPGRSLRLSCAASGATSNTYYMGWFRLAPGKEREGVASIYTQDGRTAYADSVKGRFTISEDNAKNTVYLQMNSLRAEDTAVYYCARIDIDGYAYWGQGTLVTVSS

SEQ ID NO: 8854 - protein, 118 aa, synthetic construct
QVQLVESGGGVVQPGRSLRLSCAASGSSDEIYAMAWFRQAPGKGRELVAAIENDGTTTYAHSVKGRFTISADTSKNTAYLQMNSLRAEDTAVYYCARDSTSWWYFDLWGQGTLVTVSS

SEQ ID NO: 8855 - protein, 117 aa, synthetic construct
QVQLVESGGGVVQPGRSLRLSCAASGPSASAKAMAWFRQSVGKEREGIAAIRHDGGETWYAASVKGRFTISRDNAKNTLYLQMNSLRAEDTAVYYCVRDHGGARDIWGQGTLVTVSS

SEQ ID NO: 8856 - protein, 118 aa, synthetic construct
QVQLVESGGGVVQPGRSLRLSCAASGLSVSDSSMAWFRQRPGQEREGIAAIDTGDGSTYYLNSVEGRFTISHDNAKNTLYLQMNSLRAEDTAVYYCVRQQRDGLVNFWGQGTLVTVSS

SEQ ID NO: 8857 - protein, 119 aa, synthetic construct
QVQLVESGGGVVQPGRSLRLSCAASGFTVGARAMAWYRQAPGKDREGVAAIDSDGIASYADSVKGRFTISRDNAKNTLYLQMNSLRAEDTAVYYCARVSGSYGDYFDYWGQGTLVTVSS

SEQ ID NO: 8858 - protein, 116 aa, synthetic construct
QVQLVESGGGVVQPGRSLRLSCAASGYTFDESDMGWFRQAPGKGRELVSTISPDGTTYYADSVEGRFTISRDNAKRMVYLQMNSLRAEDTAVYYCARWRRSWFDTWGQGTLVTVSS

SEQ ID NO: 8859 - protein, 118 aa, synthetic construct
QVQLVESGGGVVQPGRSLRLSCAASGYTVATYFIGWFRQAPGKAREGVATITSDGRTKYADSVKGRFTISRDNAKNTVYLQMNSLRAEDTAVYYCASRSIAAAGEGYWGQGTLVTVSS

SEQ ID NO: 8860 - protein, 116 aa, synthetic construct
QVQLVESGGGVVQPGRSLRLSCAASGYPSCMGWARQAPGKGLEWVACIERRGRIHYAASVKGRFTISRDNSKNTLYLQMNSLRAEDTAVYYCASQDSSSYDAFDIWGQGTLVTVSS

SEQ ID NO: 8861 - protein, 117 aa, synthetic construct
QVQLVESGGGVVQPGRSLRLSCAASGGAYRKYYMGWFRQAPGKGRELVAAIESDGTTDYADSVEGRFTISRDNAKRMVYLQMNSLRAEDTAVYYCASVIGGNSEDYWGQGTLVTVSS

SEQ ID NO: 8862 - protein, 125 aa, synthetic construct
QVQLVESGGGVVQPGRSLRLSCAASGDANEFEWIGWYRQAPGKGRELVARIGSSGPRYADSVEGRFTISRDNSKNTLYLQMNSLRAEDTAVYYCAATHCSFLTTSVAGCTDDKYWGQGTLVTVSS

SEQ ID NO: 8863 - protein, 119 aa, synthetic construct
QVQLVESGGGVVQPGRSLRLSCAASGFTLGTNCMAWFRQAPGKERERVASIGSDGRTYYADSVKGRFTISRDNSKNTLYLQMNSLRAEDTAVYYCARAPGIQLWKFDYWGQGTLVTVSS

SEQ ID NO: 8864 - protein, 119 aa, synthetic construct
QVQLVESGGGVVQPGRSLRLSCAASGFTNSKTYLGWVRRAPGKGLEWVAAIAPSTGSTYYDDSVKGRFTISRDNSKNTLYLQMNSLRAEDTAVYYCASQGSSWYENDYWGQGTLVTVSS

SEQ ID NO: 8865 - protein, 119 aa, synthetic construct
QVQLVESGGGVVQPGRSLRLSCAASGFRFDDYAMGWFRQAPGKEREGVAGYKSDGSTTYADSVKGRFTISRDNSKNTLYLQMNSLRAEDTAVYYCASRALYGGKPFVIWGQGTLVTVSS

SEQ ID NO: 8866 - protein, 127 aa, synthetic construct
QVQLVESGGGVVQPGRSLRLSCAASGSPDRRACMGWYRQAPGKERERVAEIDTDGNTSYADSVKGRFTISRDNSKNTVYLQMNSLRAEDTAVYYCALQPGCPPATLFYWRKTGFGNWGQGTLVTVSS

SEQ ID NO: 8867 - protein, 122 aa, synthetic construct
QVQLVESGGGVVQPGRSLRLSCAASGFTFDDTDMGWFRQAPGKERERVSTINSDGGTTYYADSVKGRFTISRDNSKNTLYLQMNSLRAEDTAVYYCARARVTDAGWQYFDYWGQGTLVTVSS

SEQ ID NO: 8868 - protein, 117 aa, synthetic construct
QVQLVESGGGVVQPGRSLRLSCAASGFTFSDYYIGWFRQAPGKERERVAQIDKNGVTNYADAVKGRFTISRDNSKNTLYLQMNSLRAEDTAVYYCAGVDAFNYMEVWGQGTLVTVSS

SEQ ID NO: 8869 - protein, 121 aa, synthetic construct
QVQLVESGGGVVQPGRSLRLSCAASGDFNDARAEWGWFRQAPGKGRELVASLASDGSTIYANPVEGRFTISRDNAKNTLYLQMNSLRAEDTAVYYCARSGASSSWYWFDYWGQGTLVTVSS

SEQ ID NO: 8870 - protein, 118 aa, synthetic construct
QVQLVESGGGVVQPGRSLRLSCAASGSIHNRRHMGWFRQAAGKEREGVAAIDIAGNTRISDSVKGRFTISHDKDENRLYLQMNSLRAEDTAVYYCAIQSSDGRGTVYWGQGTLVTVSS

SEQ ID NO: 8871 - protein, 119 aa, synthetic construct
QVQLVESGGGVVQPGRSLRLSCAASGRRGNNYSMAWYRQAPGKDREGVAAIDSDGDTSYADPVKGRFTISRDNSKNTLYLQMNSLRAEDTAVYYCAVATGEYRRYFDVWGQGTLVTVSS

SEQ ID NO: 8872 - protein, 118 aa, synthetic construct
QVQLVESGGGVVQPGRSLRLSCAASGFAFTKYHMSWFRQAPGKGRELVSHISAGGRTYYSDSVEGRFTISRDNAKRMVYLQMNSLRAEDTAVYYCVKESRPHSYGDHWGQGTLVTVSS

SEQ ID NO: 8873 - protein, 118 aa, synthetic construct
QVQLVESGGGVVQPGRSLRLSCAASGVTFDEVDMGWARQAPGKGLEWVSRIASDGRTYYTDSVKGRFTISRDNAKRMVYLQMNSLRAEDTAVYYCTRRTIWGDAFDIWGQGTLVTVSS

SEQ ID NO: 8874 - protein, 121 aa, synthetic construct
QVQLVESGGGVVQPGRSLRLSCAASGYSPAKYAMGWARQAPGKGLEWVATIGRDGVAFYADSVKGRFTISRDNSKNTVYLQMNSLRAEDTAVYYCAKGDYGDFQHYYLDYWGQGTLVTVSS

SEQ ID NO: 8875 - protein, 120 aa, synthetic construct
QVQLVESGGGVVQPGRSLRLSCAASGFTFSNNWMHWFRQAPGKGRELVAIVDDDGDPTYAPSVEGRFTISRDNSKNTLYLQMNSLRAEDTAVYYCASSAGSYYYYGMDVWGQGTLVTVSS

SEQ ID NO: 8876 - protein, 119 aa, synthetic construct
QVQLVESGGGVVQPGRSLRLSCAASGFTIRDSDMGWFRQAPGKGRELVSTITSGGTTWYADSVEGRFTISRDNAKRMVYLQMNSLRAEDTAVYYCARSYNWNFYGMDVWGQGTLVTVSS

SEQ ID NO: 8877 - protein, 121 aa, synthetic construct
QVQLVESGGGVVQPGRSLRLSCAASGFTFDDTDMGWFRQAPGKERERVSSISVDGNTWYSESVKGRFTISRDNSKNTVYLQMNSLRAEDTAVYYCARGRMGSSWYWYFDLWGQGTLVTVSS

SEQ ID NO: 8878 - protein, 118 aa, synthetic construct
QVQLVESGGGVVQPGRSLRLSCAASGIVFGSHDMGWARQAPGKGLEWVATLTKAGQTLYTDTVKGRFTISADTSKNTAYLQMNSLRAEDTAVYYCASDSRRDGWLDSWGQGTLVTVSS

SEQ ID NO: 8879 - protein, 55 aa, synthetic construct
KKKYKITVTVPGKKEEEVIEVEEKDLTDVLTQKALEAAKKWGVKSGVKAEAEELE

SEQ ID NO: 8880 - protein, 117 aa, synthetic construct
QVQLVESGGGVVQPGRSLRLSCAASGFSFSNFGMSWVRQARGKGLEWVSSIGSDGRAYYADSVKHRFTISRDNAKNTLYLQMNSLRAEDTAVYYCARAPSRHGFDYWGQGTLVTVSS

SEQ ID NO: 8881 - protein, 117 aa, synthetic construct
QVQLVESGGGVVQPGRSLRLSCAASGFSFSNFGMSWVRQARGKGLEWVSSIGSDIRAYYADSVKGRFTISRDNAKNTLYLQMNSLRAEDTAVYYCARAPSRHGFDYWGQGTLVTVSS

SEQ ID NO: 8882 - protein, 126 aa, synthetic construct
QVQLVESGGGVVQPGRSLRLSCAASGFTFSNYAMTWFRQAPGKGRELVSAINGAGVTYYADSVEGRFTISRDNAKRMVYLQMNSLRAEDTAVYYCARASYYDFWSGYEDYYGMDVWGQGTLVTVSS

SEQ ID NO: 8883 - protein, 119 aa, synthetic construct
QVQLVESGGGVVQPGRSLRLSCAASGFSFNDADMGWARQAPGKGLEWVSTITADGSPYYSDSVKGRFTISRDNSKNTLYLQMNSLRAEDTAVYYCARAAGRSIGWFDPWGQGTLVTVSS

SEQ ID NO: 8884 - protein, 119 aa, synthetic construct
QVQLVESGGGVVQPGRSLRLSCAASGAGYRPTTMGWFRQAPGKERERVAAISASGVSTNYADSVKGRFTISRDNSKNTLYLQMNSLRAEDTAVYYCARAITPGGYFDSWGQGTLVTVSS

SEQ ID NO: 8885 - protein, 117 aa, synthetic construct
QVQLVESGGGVVQPGRSLRLSCAASGFSFSNFGMSWVRQARGKGLEWVSSIGSDGRAYYADSVFGRFTISRDNAKNTLYLQMNSLRAEDTAVYYCARAPSRHGFDYWGQGTLVTVSS

SEQ ID NO: 8886 - protein, 117 aa, synthetic construct
QVQLVESGGGVVQPGRSLRLSCAASGFSFSNFGMSWVRQARGKGLEWVSSIGSDGRAYYMDSVKGRFTISRDNAKNTLYLQMNSLRAEDTAVYYCARAPSRHGFDYWGQGTLVTVSS

SEQ ID NO: 8887 - protein, 121 aa, synthetic construct
QVQLVESGGGVVQPGRSLRLSCAASGFTFSSYAMSWFRQALGKDREGVAAIDSDGGTSYGESVKGRFTISRDNSKNTVYLQMNSLRAEDTAVYYCARAAPVGDDYYRMDYWGQGTLVTVSS

SEQ ID NO: 8888 - protein, 118 aa, synthetic construct
QVQLVESGGGVVQPGRSLRLSCAASGFTISGYSMHWFRQAPGKGLEWVASIDTGGDRTYAPAVKGRFTISRDNSKNTLYLQMNSVRAEDTAVYYCATDRNGGGAFDVWGQGTLVTVSS

SEQ ID NO: 8889 - protein, 118 aa, synthetic construct
QVQLVESGGGVVQPGRSLRLSCAASGFTISGYTMHWFRQAPGKGLEWVASIDTGGDTTYSPSVKGRFTISRDNSSNTLYLQMNSLRAEDTAVYYCATDRNGGGAFDVWGQGTLVTVSS

SEQ ID NO: 8890 - protein, 118 aa, synthetic construct
QVQLVESGGGVVQPGRSLRLSCAASGFTISGYTMHWFRQAPGKGLEWVASDDTGGDTTYLPSVKRRFTISRDNSKNTLYLQMNSLRAEDTAVYYCATDRNGGGAFDVWGQGTLVTVSS

SEQ ID NO: 8891 - protein, 117 aa, synthetic construct
QVQLVESGGGVVQPGRSLRLSCAASGATSNTYGMGWFRLAPGKEREGVASIYTQDGRTAYADSVKGRFTISEDNAKNTVYLQMNSLRAEDTAVYYCARIDIDGYAYWGQGTLVTVSS

SEQ ID NO: 8892 - protein, 117 aa, synthetic construct
QVQLVESGGGVVQPGRSLRLSCAASGATSNTYYMGWFRLAPGKEREGVASIYTQDGRTAVADSVKGRFTISEDNAKNTVYLQMNSLRAEDTAVYYCARIDIDGYAYWGQGTLVTVSS

SEQ ID NO: 8893 - protein, 117 aa, synthetic construct
QVQLVESGGGVVQPGRSLRLSCAASGATSNTYYMGWFRLAPGKEREGVASIYTQDGRTAYIKSVKGRFTISEDNAKNTVYLQMNSLRAEDTAVYYCARIDIDGYAYWGQGTLVTVSS

SEQ ID NO: 8894 - protein, 117 aa, synthetic construct
QVQLVESGGGVVQPGRSLRLSCAASGATSNTYYMGWFRLAPGKEREGVASIYTQDGRTAYADSVKGRFTISEDNAKNTVYLQMNSLRAEDTAVYYCARHDIDGYVYWGQGTLVTVSS

SEQ ID NO: 8895 - protein, 17 aa, synthetic construct
YYCARTVGAAAFDIWGQ

SEQ ID NO: 8896 - protein, 18 aa, synthetic construct
YYCGTLDSILRSWVFGQG

SEQ ID NO: 8897 - protein, 18 aa, synthetic construct
YYCARSGNSYGQFDYWGQ

SEQ ID NO: 8898 - protein, 16 aa, synthetic construct
YYCQTWGTGHVVFGQG

SEQ ID NO: 8899 - protein, 17 aa, synthetic construct
YYCATYDVLTGFEYWGQ

SEQ ID NO: 8900 - protein, 16 aa, synthetic construct
YYCQTWGTGIRVFGQG

SEQ ID NO: 8901 - protein, 19 aa, synthetic construct
YYCARDRGYSGYGLRYWGQ

SEQ ID NO: 8902 - protein, 16 aa, synthetic construct
YYCQSYDHNSVVFGQG

SEQ ID NO: 8903 - protein, 17 aa, synthetic construct
YYCSGGELARGFDPWGQ

SEQ ID NO: 8904 - protein, 16 aa, synthetic construct
YYCQQSVTIPRTFGQG

SEQ ID NO: 8905 - protein, 16 aa, synthetic construct
YYCARDWWGAFDVWGQ

SEQ ID NO: 8906 - protein, 16 aa, synthetic construct
YYCQQFNSLGWIFGQG

SEQ ID NO: 8907 - protein, 20 aa, synthetic construct
YYCARGGSVDIAYGFDYWGQ

SEQ ID NO: 8908 - protein, 16 aa, synthetic construct
YYCQQANSFPLTFGQG

SEQ ID NO: 8909 - protein, 20 aa, synthetic construct
YYCARTVGPYGRTYFDYWGQ

SEQ ID NO: 8910 - protein, 16 aa, synthetic construct
YYCQQAISFPLTFGQG

SEQ ID NO: 8911 - protein, 16 aa, synthetic construct
YYCQQANSFPITFGQG

SEQ ID NO: 8912 - protein, 16 aa, synthetic construct
YYCQQANSFPPTFGQG

SEQ ID NO: 8913 - protein, 16 aa, synthetic construct
YYCQQAYSFPPTFGQG

SEQ ID NO: 8914 - protein, 16 aa, synthetic construct
YYCQQGINWPLTFGQG

SEQ ID NO: 8915 - protein, 15 aa, synthetic construct
YYCQTWGSGIVFGQG

SEQ ID NO: 8916 - protein, 17 aa, synthetic construct
YYCARARGANTWDYWGQ

SEQ ID NO: 8917 - protein, 16 aa, synthetic construct
YYCQQEYSFPVTFGQG

SEQ ID NO: 8918 - protein, 19 aa, synthetic construct
YYCARGPGYSYAAMDVWGQ

SEQ ID NO: 8919 - protein, 16 aa, synthetic construct
YYCQQDYSFPPTFGQG

SEQ ID NO: 8920 - protein, 18 aa, synthetic construct
YYCARSGQYGGYFDYWGQ

SEQ ID NO: 8921 - protein, 16 aa, synthetic construct
YYCARTAAYVLGHWGQ

SEQ ID NO: 8922 - protein, 16 aa, synthetic construct
YYCQQSYSIPFTFGQG

SEQ ID NO: 8923 - protein, 16 aa, synthetic construct
YYCQQSYSIPLTFGQG

SEQ ID NO: 8924 - protein, 20 aa, synthetic construct
YYCAKNDILAYGSAFDYWGQ

SEQ ID NO: 8925 - protein, 18 aa, synthetic construct
YYCQVWDSSSDHWVFGQG

SEQ ID NO: 8926 - protein, 20 aa, synthetic construct
YYCAKNDILAYGSASDYWGQ

SEQ ID NO: 8927 - protein, 20 aa, synthetic construct
YYCAKNDILTYGSAFDYWGQ

SEQ ID NO: 8928 - protein, 18 aa, synthetic construct
YYCQVWDGGSDHWVFGQG

SEQ ID NO: 8929 - protein, 18 aa, synthetic construct
YYCQVWDNGSDHWVFGQG

SEQ ID NO: 8930 - protein, 18 aa, synthetic construct
YYCQVWDSISDHWVFGQG

SEQ ID NO: 8931 - protein, 18 aa, synthetic construct
YYCQVWDTNTDHWLFGQG

SEQ ID NO: 8932 - protein, 16 aa, synthetic construct
YYCAKNRYSYGDYWGQ

SEQ ID NO: 8933 - protein, 17 aa, synthetic construct
YYCAAWDDLSGWVFGQG

SEQ ID NO: 8934 - protein, 19 aa, synthetic construct
YYCARGPRFGELPFDYWGQ

SEQ ID NO: 8935 - protein, 17 aa, synthetic construct
YYCQQSYSNTTWLFGQG

SEQ ID NO: 8936 - protein, 20 aa, synthetic construct
YYCARQGWLATTRGMDLWGQ

SEQ ID NO: 8937 - protein, 16 aa, synthetic construct
YYCQAGDRTTGQFGQG

SEQ ID NO: 8938 - protein, 20 aa, synthetic construct
YYCARANVYQQTWAFDPWGQ

SEQ ID NO: 8939 - protein, 16 aa, synthetic construct
YYCMQGERWPLAFGQG

SEQ ID NO: 8940 - protein, 22 aa, synthetic construct
YYCARFGVGYDTHYMYFDHWGQ

SEQ ID NO: 8941 - protein, 16 aa, synthetic construct
YYCQQFHSFPLTFGQG

SEQ ID NO: 8942 - protein, 17 aa, synthetic construct
YYCARMSRYGAFDLWGQ

SEQ ID NO: 8943 - protein, 16 aa, synthetic construct
YYCQQYNNWPLTFGQG

SEQ ID NO: 8944 - protein, 19 aa, synthetic construct
YYCARPLPNVGYGMDVWGQ

SEQ ID NO: 8945 - protein, 19 aa, synthetic construct
YYCGTWDSSLLLSYVFGQG

SEQ ID NO: 8946 - protein, 19 aa, synthetic construct
YYCARTRIGYSHHADYWGQ

SEQ ID NO: 8947 - protein, 17 aa, synthetic construct
YYCYSYVGSSTWVFGQG

SEQ ID NO: 8948 - protein, 24 aa, synthetic construct
YYCARWNIAIVGAAPVPVMDVWGQ

SEQ ID NO: 8949 - protein, 16 aa, synthetic construct
YYCQQANSFPVSFGQG

SEQ ID NO: 8950 - protein, 16 aa, synthetic construct
YYCQQANSFPVTFGQG

SEQ ID NO: 8951 - protein, 23 aa, synthetic construct
YYCAKDRGGDVVTAGRGFDYWGQ

SEQ ID NO: 8952 - protein, 17 aa, synthetic construct
YYCQQYNNWPPITFGQG

SEQ ID NO: 8953 - protein, 17 aa, synthetic construct
YYCANGRSSAYFNHWGQ

SEQ ID NO: 8954 - protein, 16 aa, synthetic construct
YYCQQANSFPYTFGQG

SEQ ID NO: 8955 - protein, 18 aa, synthetic construct
YYCARYGSNYRYFDRWGQ

SEQ ID NO: 8956 - protein, 16 aa, synthetic construct
YYCMQGSHWPWAFGQG

SEQ ID NO: 8957 - protein, 18 aa, synthetic construct
YYCASPKYGDFYFDYWGQ

SEQ ID NO: 8958 - protein, 16 aa, synthetic construct
YYCQQHYAIPLTFGQG

SEQ ID NO: 8959 - protein, 19 aa, synthetic construct
YYCARGLIMTPGYLDYWGQ

SEQ ID NO: 8960 - protein, 16 aa, synthetic construct
YYCQTWGTGGLVFGQG

SEQ ID NO: 8961 - protein, 24 aa, synthetic construct
YYCARMRWGIYRGKLSVYMDVWGQ

SEQ ID NO: 8962 - protein, 17 aa, synthetic construct
YYCQSYDSSLSGVFGQG

SEQ ID NO: 8963 - protein, 14 aa, synthetic construct
YYCATNDWWGHWGQ

SEQ ID NO: 8964 - protein, 18 aa, synthetic construct
YYCQVWDSQSNSWVFGQG

SEQ ID NO: 8965 - protein, 17 aa, synthetic construct
YYCARDTGFGSFDYWGQ

SEQ ID NO: 8966 - protein, 17 aa, synthetic construct
YYCSSYTSSSTWGFGQG

SEQ ID NO: 8967 - protein, 27 aa, synthetic construct
YYCARERGGDYGSGYYLPNYGMDVWGQ

SEQ ID NO: 8968 - protein, 17 aa, synthetic construct
YYCQQYDTTPPLTFGQG

SEQ ID NO: 8969 - protein, 19 aa, synthetic construct
YYCAREWGGSWFGMDPWGQ

SEQ ID NO: 8970 - protein, 16 aa, synthetic construct
YYCQQYNSSSITFGQG

SEQ ID NO: 8971 - protein, 16 aa, synthetic construct
YYCQSYDSSNAVFGQG

SEQ ID NO: 8972 - protein, 19 aa, synthetic construct
YYCATYLGGIVGASDYWGQ

SEQ ID NO: 8973 - protein, 16 aa, synthetic construct
YYCQQEYTAPVTFGQG

SEQ ID NO: 8974 - protein, 14 aa, synthetic construct
YYCAAGSTYDVWGQ

SEQ ID NO: 8975 - protein, 15 aa, synthetic construct
YYCQVWDNNVVFGQG

SEQ ID NO: 8976 - protein, 17 aa, synthetic construct
YYCQVWDSSSGVVFGQG

SEQ ID NO: 8977 - protein, 23 aa, synthetic construct
YYCARGRYRNLSYDDDDFDIWGQ

SEQ ID NO: 8978 - protein, 17 aa, synthetic construct
YYCQAWDSSTGVVFGQG

SEQ ID NO: 8979 - protein, 17 aa, synthetic construct
YYCASAGPDDDFDYWGQ

SEQ ID NO: 8980 - protein, 15 aa, synthetic construct
YYCQVWDSSTVFGQG

SEQ ID NO: 8981 - protein, 16 aa, synthetic construct
YYCARDVQYRFDPWGQ

SEQ ID NO: 8982 - protein, 16 aa, synthetic construct
YYCGQNKQFPWTFGQG

SEQ ID NO: 8983 - protein, 15 aa, synthetic construct
YYCAREYYGIDVWGQ

SEQ ID NO: 8984 - protein, 20 aa, synthetic construct
YYCQSYDSSLSSPNVVFGQG

SEQ ID NO: 8985 - protein, 19 aa, synthetic construct
YYCAGAGSSAASGFATWGQ

SEQ ID NO: 8986 - protein, 16 aa, synthetic construct
YYCQTWGAASGVFGQG

SEQ ID NO: 8987 - protein, 17 aa, synthetic construct
YYCARDTSSGAMDIWGQ

SEQ ID NO: 8988 - protein, 17 aa, synthetic construct
YYCSSFGGNDNLIFGQG

SEQ ID NO: 8989 - protein, 16 aa, synthetic construct
YYCQQEGSSPITFGQG

SEQ ID NO: 8990 - protein, 16 aa, synthetic construct
YYCQQYGSSPITFGQG

SEQ ID NO: 8991 - protein, 18 aa, synthetic construct
YYCQSYDFGLGIMVFGQG

SEQ ID NO: 8992 - protein, 19 aa, synthetic construct
YYCQSYDISNLSHVVFGQG

SEQ ID NO: 8993 - protein, 16 aa, synthetic construct
YYCSSYTSSSKVFGQG

SEQ ID NO: 8994 - protein, 18 aa, synthetic construct
YYCARGGASIGVFDVWGQ

SEQ ID NO: 8995 - protein, 15 aa, synthetic construct
YYCQTWGTGMVFGQG

SEQ ID NO: 8996 - protein, 15 aa, synthetic construct
YYCAPNSNSPSYWGQ

SEQ ID NO: 8997 - protein, 18 aa, synthetic construct
YYCHMWNASRNHWVFGQG

SEQ ID NO: 8998 - protein, 18 aa, synthetic construct
YYCHVWDSSGDHWVFGQG

SEQ ID NO: 8999 - protein, 16 aa, synthetic construct
YYCARNHHSDFDHWGQ

SEQ ID NO: 9000 - protein, 16 aa, synthetic construct
YYCQEYNAYPTTFGQG

SEQ ID NO: 9001 - protein, 16 aa, synthetic construct
YYCQQTVTPPFTFGQG

SEQ ID NO: 9002 - protein, 16 aa, synthetic construct
YYCQQYGSSPRTFGQG

SEQ ID NO: 9003 - protein, 16 aa, synthetic construct
YYCQQYYSTPRTFGQG

SEQ ID NO: 9004 - protein, 15 aa, synthetic construct
YYCARNWNDFDYWGQ

SEQ ID NO: 9005 - protein, 16 aa, synthetic construct
YYCQRYESSPRTFGQG

SEQ ID NO: 9006 - protein, 20 aa, synthetic construct
YYCVRHSGWLFPSAFDVWGQ

SEQ ID NO: 9007 - protein, 16 aa, synthetic construct
YYCQNWGTGVGGFGQG

SEQ ID NO: 9008 - protein, 19 aa, synthetic construct
YYCARGSVSTGIAFYYWGQ

SEQ ID NO: 9009 - protein, 17 aa, synthetic construct
YYCSSYTSSSSLVFGQG

SEQ ID NO: 9010 - protein, 26 aa, synthetic construct
YYCARGRYLASSSAHGGYYALDYWGQ

SEQ ID NO: 9011 - protein, 16 aa, synthetic construct
YYCQQAYSPPISFGQG

SEQ ID NO: 9012 - protein, 16 aa, synthetic construct
YYCQQAYSPPITFGQG

SEQ ID NO: 9013 - protein, 18 aa, synthetic construct
YYCARDFHRAYGMDYWGQ

SEQ ID NO: 9014 - protein, 18 aa, synthetic construct
YYCAREWLGTTGMDVWGQ

SEQ ID NO: 9015 - protein, 19 aa, synthetic construct
YYCGTWDSSSAPFYVFGQG

SEQ ID NO: 9016 - protein, 19 aa, synthetic construct
YYCGTWDSSSGPLKVFGQG

SEQ ID NO: 9017 - protein, 17 aa, synthetic construct
YYCARHDFSTGAYDWGQ

SEQ ID NO: 9018 - protein, 16 aa, synthetic construct
YYCMQGARWPLAFGQG

SEQ ID NO: 9019 - protein, 18 aa, synthetic construct
YYCARQKLRGDGFDTWGQ

SEQ ID NO: 9020 - protein, 15 aa, synthetic construct
YYCQHYGGPFTFGQG

SEQ ID NO: 9021 - protein, 21 aa, synthetic construct
YYCAADPLDEWDAYLFDVWGQ

SEQ ID NO: 9022 - protein, 16 aa, synthetic construct
YYCEAWESDTRIFGQG

SEQ ID NO: 9023 - protein, 15 aa, synthetic construct
YYCAKGRWDFDSWGQ

SEQ ID NO: 9024 - protein, 19 aa, synthetic construct
YYCQVWDSSSDKPYVFGQG

SEQ ID NO: 9025 - protein, 15 aa, synthetic construct
YYCARGDFLFRYWGQ

SEQ ID NO: 9026 - protein, 18 aa, synthetic construct
YYCQAWDSSTPFYVFGQG

SEQ ID NO: 9027 - protein, 18 aa, synthetic construct
YYCAKDEVWIAAFDYWGQ

SEQ ID NO: 9028 - protein, 20 aa, synthetic construct
YYCARDGSRDYGAGFDYWGQ

SEQ ID NO: 9029 - protein, 16 aa, synthetic construct
YYCQTWGNTHLVFGQG

SEQ ID NO: 9030 - protein, 18 aa, synthetic construct
YYCARDRTSRAALDYWGQ

SEQ ID NO: 9031 - protein, 16 aa, synthetic construct
YYCQTWGDTHLVFGQG

SEQ ID NO: 9032 - protein, 22 aa, synthetic construct
YYCARLYHTAYRYTYYFDVWGQ

SEQ ID NO: 9033 - protein, 16 aa, synthetic construct
YYCHVWDSSDVVFGQG

SEQ ID NO: 9034 - protein, 22 aa, synthetic construct
YYCAAHGGTNSRGWKALDYWGQ

SEQ ID NO: 9035 - protein, 18 aa, synthetic construct
YYCQAWDSTTPTVVFGQG

SEQ ID NO: 9036 - protein, 17 aa, synthetic construct
YYCARNRGTGDLDYWGQ

SEQ ID NO: 9037 - protein, 19 aa, synthetic construct
YYCQVWDNGSDHLVVFGQG

SEQ ID NO: 9038 - protein, 19 aa, synthetic construct
YYCQVWDSSSDHLVVFGQG

SEQ ID NO: 9039 - protein, 17 aa, synthetic construct
YYCARNSGQGDLNPWGQ

SEQ ID NO: 9040 - protein, 21 aa, synthetic construct
YYCGTWDSSLLSSSLVVFGQG

SEQ ID NO: 9041 - protein, 19 aa, synthetic construct
YYCQAWDTSTSSHVVFGQG

SEQ ID NO: 9042 - protein, 19 aa, synthetic construct
YYCQVWDSSASPHVVFGQG

SEQ ID NO: 9043 - protein, 19 aa, synthetic construct
YYCQVWDSSSDGLVVFGQG

SEQ ID NO: 9044 - protein, 17 aa, synthetic construct
YYCARNSGQGELKPWGQ

SEQ ID NO: 9045 - protein, 19 aa, synthetic construct
YYCQVWDTSGNHPVVFGQG

SEQ ID NO: 9046 - protein, 17 aa, synthetic construct
YYCARNSGQGELNPWGQ

SEQ ID NO: 9047 - protein, 19 aa, synthetic construct
YYCQVWDASSDPFVVFGQG

SEQ ID NO: 9048 - protein, 19 aa, synthetic construct
YYCQVWDSSSDHHVVFGQG

SEQ ID NO: 9049 - protein, 18 aa, synthetic construct
YYCQVWDSSSPVVVFGQG

SEQ ID NO: 9050 - protein, 17 aa, synthetic construct
YYCARDPRGDAFDIWGQ

SEQ ID NO: 9051 - protein, 16 aa, synthetic construct
YYCQQYHTTPPTFGQG

SEQ ID NO: 9052 - protein, 19 aa, synthetic construct
YYCARGDSSGWDYFDHWGQ

SEQ ID NO: 9053 - protein, 17 aa, synthetic construct
YYCQQSNSPPPITFGQG

SEQ ID NO: 9054 - protein, 19 aa, synthetic construct
YYCARLSGTYYYAMDVWGQ

SEQ ID NO: 9055 - protein, 16 aa, synthetic construct
YYCQQSDRLPLTFGQG

SEQ ID NO: 9056 - protein, 27 aa, synthetic construct
YYCARLGYKGFAYLGSYSSYAFDLWGQ

SEQ ID NO: 9057 - protein, 16 aa, synthetic construct
YYCQQSNSPPITFGQG

SEQ ID NO: 9058 - DNA, 17 bp, synthetic construct
  source 1..17: mol_type = other DNA
aaataaaatacgaaatg

SEQ ID NO: 9059 - protein, 4 aa, synthetic construct
GGGS

SEQ ID NO: 9060 - protein, 5 aa, synthetic construct
GGGGS

SEQ ID NO: 9061 - DNA, 20 bp, synthetic construct
  source 1..20: mol_type = other DNA
  modified_base 1: mod_base = OTHER; note = 5'-Azide modified locked nucleic acid with phosphorothioate linkage
  modified_base 2: mod_base = OTHER; note = Locked nucleic acid with phosphorothioate linkage
  modified_base 3: mod_base = OTHER; note = Locked nucleic acid with phosphorothioate linkage
  modified_base 4: mod_base = OTHER; note = Locked nucleic acid with phosphorothioate linkage
  modified_base 5: mod_base = OTHER; note = Locked nucleic acid with phosphorothioate linkage
  modified_base 6: mod_base = OTHER; note = Nucleotide with phosphorothioate linkage
  modified_base 7: mod_base = OTHER; note = Nucleotide with phosphorothioate linkage
  modified_base 8: mod_base = OTHER; note = Nucleotide with phosphorothioate linkage
  modified_base 9: mod_base = OTHER; note = Nucleotide with phosphorothioate linkage
  modified_base 10: mod_base = OTHER; note = Nucleotide with phosphorothioate linkage
  modified_base 11: mod_base = OTHER; note = Nucleotide with phosphorothioate linkage
  modified_base 12: mod_base = OTHER; note = Nucleotide with phosphorothioate linkage
  modified_base 13: mod_base = OTHER; note = Nucleotide with phosphorothioate linkage
  modified_base 14: mod_base = OTHER; note = Nucleotide with phosphorothioate linkage
  modified_base 15: mod_base = OTHER; note = Nucleotide with phosphorothioate linkage
  modified_base 16: mod_base = OTHER; note = Locked nucleic acid with phosphorothioate linkage
  modified_base 17: mod_base = OTHER; note = Locked nucleic acid with phosphorothioate linkage
  modified_base 18: mod_base = OTHER; note = Locked nucleic acid with phosphorothioate linkage
  modified_base 19: mod_base = OTHER; note = Locked nucleic acid with phosphorothioate linkage
  modified_base 20: mod_base = OTHER; note = Locked nucleic acid
ggcatatgcagataatgttc

SEQ ID NO: 9062 - protein, 18 aa, synthetic construct
GGGGGSLPETGGHHHHHH

SEQ ID NO: 9063 - RNA, 5000 nt, synthetic construct
  source 1..5000: mol_type = other RNA
  misc_difference 1..5000: note = This sequence may encompass 50, 60, 70, 100, 200, 500, 1000, 2000, 3000, 4000, or 5000 nucleotides
aaaaaaaaaaaaaaaaaaaaaaaaaaaaaaaaaaaaaaaaaaaaaaaaaaaaaaaaaaaaaaaaaaaaaaaaaaaaaaaaaaaaaaaaaaaaaaaaaaaaaaaaaaaaaaaaaaaaaaaaaaaaaaaaaaaaaaaaaaaaaaaaaaaaaaaaaaaaaaaaaaaaaaaaaaaaaaaaaaaaaaaaaaaaaaaaaaaaaaaaaaaaaaaaaaaaaaaaaaaaaaaaaaaaaaaaaaaaaaaaaaaaaaaaaaaaaaaaaaaaaaaaaaaaaaaaaaaaaaaaaaaaaaaaaaaaaaaaaaaaaaaaaaaaaaaaaaaaaaaaaaaaaaaaaaaaaaaaaaaaaaaaaaaaaaaaaaaaaaaaaaaaaaaaaaaaaaaaaaaaaaaaaaaaaaaaaaaaaaaaaaaaaaaaaaaaaaaaaaaaaaaaaaaaaaaaaaaaaaaaaaaaaaaaaaaaaaaaaaaaaaaaaaaaaaaaaaaaaaaaaaaaaaaaaaaaaaaaaaaaaaaaaaaaaaaaaaaaaaaaaaaaaaaaaaaaaaaaaaaaaaaaaaaaaaaaaaaaaaaaaaaaaaaaaaaaaaaaaaaaaaaaaaaaaaaaaaaaaaaaaaaaaaaaaaaaaaaaaaaaaaaaaaaaaaaaaaaaaaaaaaaaaaaaaaaaaaaaaaaaaaaaaaaaaaaaaaaaaaaaaaaaaaaaaaaaaaaaaaaaaaaaaaaaaaaaaaaaaaaaaaaaaaaaaaaaaaaaaaaaaaaaaaaaaaaaaaaaaaaaaaaaaaaaaaaaaaaaaaaaaaaaaaaaaaaaaaaaaaaaaaaaaaaaaaaaaaaaaaaaaaaaaaaaaaaaaaaaaaaaaaaaaaaaaaaaaaaaaaaaaaaaaaaaaaaaaaaaaaaaaaaaaaaaaaaaaaaaaaaaaaaaaaaaaaaaaaaaaaaaaaaaaaaaaaaaaaaaaaaaaaaaaaaaaaaaaaaaaaaaaaaaaaaaaaaaaaaaaaaaaaaaaaaaaaaaaaaaaaaaaaaaaaaaaaaaaaaaaaaaaaaaaaaaaaaaaaaaaaaaaaaaaaaaaaaaaaaaaaaaaaaaaaaaaaaaaaaaaaaaaaaaaaaaaaaaaaaaaaaaaaaaaaaaaaaaaaaaaaaaaaaaaaaaaaaaaaaaaaaaaaaaaaaaaaaaaaaaaaaaaaaaaaaaaaaaaaaaaaaaaaaaaaaaaaaaaaaaaaaaaaaaaaaaaaaaaaaaaaaaaaaaaaaaaaaaaaaaaaaaaaaaaaaaaaaaaaaaaaaaaaaaaaaaaaaaaaaaaaaaaaaaaaaaaaaaaaaaaaaaaaaaaaaaaaaaaaaaaaaaaaaaaaaaaaaaaaaaaaaaaaaaaaaaaaaaaaaaaaaaaaaaaaaaaaaaaaaaaaaaaaaaaaaaaaaaaaaaaaaaaaaaaaaaaaaaaaaaaaaaaaaaaaaaaaaaaaaaaaaaaaaaaaaaaaaaaaaaaaaaaaaaaaaaaaaaaaaaaaaaaaaaaaaaaaaaaaaaaaaaaaaaaaaaaaaaaaaaaaaaaaaaaaaaaaaaaaaaaaaaaaaaaaaaaaaaaaaaaaaaaaaaaaaaaaaaaaaaaaaaaaaaaaaaaaaaaaaaaaaaaaaaaaaaaaaaaaaaaaaaaaaaaaaaaaaaaaaaaaaaaaaaaaaaaaaaaaaaaaaaaaaaaaaaaaaaaaaaaaaaaaaaaaaaaaaaaaaaaaaaaaaaaaaaaaaaaaaaaaaaaaaaaaaaaaaaaaaaaaaaaaaaaaaaaaaaaaaaaaaaaaaaaaaaaaaaaaaaaaaaaaaaaaaaaaaaaaaaaaaaaaaaaaaaaaaaaaaaaaaaaaaaaaaaaaaaaaaaaaaaaaaaaaaaaaaaaaaaaaaaaaaaaaaaaaaaaaaaaaaaaaaaaaaaaaaaaaaaaaaaaaaaaaaaaaaaaaaaaaaaaaaaaaaaaaaaaaaaaaaaaaaaaaaaaaaaaaaaaaaaaaaaaaaaaaaaaaaaaaaaaaaaaaaaaaaaaaaaaaaaaaaaaaaaaaaaaaaaaaaaaaaaaaaaaaaaaaaaaaaaaaaaaaaaaaaaaaaaaaaaaaaaaaaaaaaaaaaaaaaaaaaaaaaaaaaaaaaaaaaaaaaaaaaaaaaaaaaaaaaaaaaaaaaaaaaaaaaaaaaaaaaaaaaaaaaaaaaaaaaaaaaaaaaaaaaaaaaaaaaaaaaaaaaaaaaaaaaaaaaaaaaaaaaaaaaaaaaaaaaaaaaaaaaaaaaaaaaaaaaaaaaaaaaaaaaaaaaaaaaaaaaaaaaaaaaaaaaaaaaaaaaaaaaaaaaaaaaaaaaaaaaaaaaaaaaaaaaaaaaaaaaaaaaaaaaaaaaaaaaaaaaaaaaaaaaaaaaaaaaaaaaaaaaaaaaaaaaaaaaaaaaaaaaaaaaaaaaaaaaaaaaaaaaaaaaaaaaaaaaaaaaaaaaaaaaaaaaaaaaaaaaaaaaaaaaaaaaaaaaaaaaaaaaaaaaaaaaaaaaaaaaaaaaaaaaaaaaaaaaaaaaaaaaaaaaaaaaaaaaaaaaaaaaaaaaaaaaaaaaaaaaaaaaaaaaaaaaaaaaaaaaaaaaaaaaaaaaaaaaaaaaaaaaaaaaaaaaaaaaaaaaaaaaaaaaaaaaaaaaaaaaaaaaaaaaaaaaaaaaaaaaaaaaaaaaaaaaaaaaaaaaaaaaaaaaaaaaaaaaaaaaaaaaaaaaaaaaaaaaaaaaaaaaaaaaaaaaaaaaaaaaaaaaaaaaaaaaaaaaaaaaaaaaaaaaaaaaaaaaaaaaaaaaaaaaaaaaaaaaaaaaaaaaaaaaaaaaaaaaaaaaaaaaaaaaaaaaaaaaaaaaaaaaaaaaaaaaaaaaaaaaaaaaaaaaaaaaaaaaaaaaaaaaaaaaaaaaaaaaaaaaaaaaaaaaaaaaaaaaaaaaaaaaaaaaaaaaaaaaaaaaaaaaaaaaaaaaaaaaaaaaaaaaaaaaaaaaaaaaaaaaaaaaaaaaaaaaaaaaaaaaaaaaaaaaaaaaaaaaaaaaaaaaaaaaaaaaaaaaaaaaaaaaaaaaaaaaaaaaaaaaaaaaaaaaaaaaaaaaaaaaaaaaaaaaaaaaaaaaaaaaaaaaaaaaaaaaaaaaaaaaaaaaaaaaaaaaaaaaaaaaaaaaaaaaaaaaaaaaaaaaaaaaaaaaaaaaaaaaaaaaaaaaaaaaaaaaaaaaaaaaaaaaaaaaaaaaaaaaaaaaaaaaaaaaaaaaaaaaaaaaaaaaaaaaaaaaaaaaaaaaaaaaaaaaaaaaaaaaaaaaaaaaaaaaaaaaaaaaaaaaaaaaaaaaaaaaaaaaaaaaaaaaaaaaaaaaaaaaaaaaaaaaaaaaaaaaaaaaaaaaaaaaaaaaaaaaaaaaaaaaaaaaaaaaaaaaaaaaaaaaaaaaaaaaaaaaaaaaaaaaaaaaaaaaaaaaaaaaaaaaaaaaaaaaaaaaaaaaaaaaaaaaaaaaaaaaaaaaaaaaaaaaaaaaaaaaaaaaaaaaaaaaaaaaaaaaaaaaaaaaaaaaaaaaaaaaaaaaaaaaaaaaaaaaaaaaaaaaaaaaaaaaaaaaaaaaaaaaaaaaaaaaaaaaaaaaaaaaaaaaaaaaaaaaaaaaaaaaaaaaaaaaaaaaaaaaaaaaaaaaaaaaaaaaaaaaaaaaaaaaaaaaaaaaaaaaaaaaaaaaaaaaaaaaaaaaaaaaaaaaaaaaaaaaaaaaaaaaaaaaaaaaaaaaaaaaaaaaaaaaaaaaaaaaaaaaaaaaaaaaaaaaaaaaaaaaaaaaaaaaaaaaaaaaaaaaaaaaaaaaaaaaaaaaaaaaaaaaaaaaaaaaaaaaaaaaaaaaaaaaaaaaaaaaaaaaaaaaaaaaaaaaaaaaaaaaaaaaaaaaaaaaaaaaaaaaaaaaaaaaaaaaaaaaaaaaaaaaaaaaaaaaaaaaaaaaaaaaaaaaaaaaaaaaaaaaaaaaaaaaaaaaaaaaaaaaaaaaaaaaaaaaaaaaaaaaaaaaaaaaaaaaaaaaaaaaaaaaaaaaaaaaaaaaaaaaaaaaaaaaaaaaaaaaaaaaaaaaaaaaaaaaaaaaaaaaaaaaaaaaaaaaaaaaaaaaaaaaaaaaaaaaaaaaaaaaaaaaaaaaaaaaaaaaaaaaaaaaaaaaaaaaaaaaaaaaaaaaaaaaaaaaaaaaaaaaaaaaaaaaaaaaaaaaaaaaaaaaaaaaaaaaaaaaaaaaaaaaaaaaaaaaaaaaaaaaaaaaaaaaaaaaaaaaaaaaaaaaaaaaaaaaaaaaaaaaaaaaaaaaaaaaaaaaaaaaaaaaaaaaaaaaaaaaaaaaaaaaaaaaaaaaaaaaaaaaaaaaaaaaaaaaaaaaaaaaaaaaaaaaaaaaaaaaaaaaaaaaaaaaaaaaaaaaaaaaaaaaaaaaaaaaaaaaaaaaaaaaaaaaaaaaaaaaaaaaaaaaaaaaaaaaaaaaaaaaaaaaaaaaaaaaaaaaaaaaaaaaaaaaaaaaaaaaaaaaaaaaaaaaaaaaaaaaaaaaaaaaaaaaaaaaaaaaaaaaaaaaaaaaaaaaaaaaaaaaaaaaaaaaaaaaaaaaaaaaaaaaaaaaaaaaaaaaaaaaaaaaaaaaaaaaaaaaaaaaaaaaaaaaaaaaaaaaaaaaaaaaaaaaaaaaaaaaaaaaaaaaaaaaaaaaaaaaaaaaaaaaaaaaaaaaaaaaaaaaaaaaaaaaaaaaaaaaaaaaaaaaaaaaaaaaaaaaaaaaaaaaaaaaaaaaaaaaaaaaaaaaaaaaaaaaaaaaaaaaaaaaaaaaaaaaaaaaaaaaaaaaaaaaaaaaaaaaaaaaaaaaaaaaaaaaaaaaaaaaaaaaaaaaaaaaaaaaaaaaaaaaaaaaaaaaaaaaaaaaaaaaaaaaaaaaaaaaaaaaaaaaaaaaaaaaaaaaaaaaaaaaaaaaaaaaaaaaaaaaaaaaaaaaaaaaaaaaaaaaaaaaaaaaaaaaaaaaaaaaaaaaaaaaaaaaaaaaaaaaaaaaaaaaaaaaaaaaaaaaaaaaa

SEQ ID NO: 9064 - protein, 6 aa, synthetic construct
HHHHHH
